United States Patent Application Publication US 2023/0390346 A1 - sequence listing, part 4

SEQ ID NO: 5 - DNA, 4090715 bp, Bacillus amyloliquefaciens (residues 2,045,359-4,090,715 of 4,090,715)
aaaaaaggcaaatgaacagaaatatgttggaagagtggggagtctggtcctatgcagattattcacagggtaaccgttatgcaggttctgaccgagcaaagcaaggaaaagcttttggcctcttttgcagaaaaaaagcaaacgcttgaacgagaatgcagccagctctattttcagcttagaaaacatgaaaaagatcagcagaatcccgatgtagcggaatcttttaaaaaagccattgaaaaaagacaagataaaatcaaaatgattgatttccaaataagccagacagagtcgctcccgcttggaagcgaagtgaaggaaaaggagatcgatgcgctgctttcaatcaacgtcggtgataactggcatgaaaaaacagcggcaaataccatcgtcataaaagacggggtagtaattgaaatccgcccgaggtgataatatgacaaacagatggtttaatgtaggcaaaattgtaaatacccacggcattaaaggcgaagtgcgggtcatttctaaaacggactttgccgaagaacggtacaagcccggcaatacgctctatttgtttgcggaaggggctgcggagccaatcaaagtaacggtcagcgcccacaggcttcacaagcagtttcacctgctgcaattcaaagaaatgccgagtctcaatgaagtcgaacacctaagaaacatggtgatcaaagttcctgaagaagacttgggagagcttgaagaagatgaattttattttcatgaaatcatcggctgcgaggttgtgtcagaagacggggaactgatcggcacagtgaaggaaatcttgacgcccggggctaatgacgtatgggtggttgcaagaaaaggcaaaaaagatgcgctcattccgtatatagcttctgtggtgaaggatattaatataaatgagaagaaaattaagattcatgtaatggaagggttaatagacgaatgaaaatcgactttttaacactgtttcccgaaatgtttcaaggggtgctcggctcatccattctgcaaaaagcacaggaaaaagaggctgtccgttttgacgtcatcaatttccgggctttttcggataataaacaccaaacggttgatgattacccgtacggcgggggagccgggatggtgttaaagccgcagcccgtatttgatgcggttgaaaagctgacagccggtacggacgccaagccgcgcattattctcgtctgcccgcaaggtgagcgttatacgcagaagaaagccgaggagctggcggaagaggaacatctcatgtttatttgcgggcattatgaagggtatgatgaacggatccgggaacatcttgtcactgatgaaatctccatcggggattttgtgctgaccgggggagagctccctgccatgatgattgccgacagcgttgtcaggcttttgccgggcgtcctcggaaaagaagcatcccacgtggaggattccttcagcacggggcttttagagcatcctcactatacgaggccagccgattataaaggcttaaaagtgcctgagacccttttgtccggcaaccatgccaaaatacaagaatggcgcaataaagaatcaatcagaagaacctttttaagacgtccggatcttcttgaaaactatcctctcactgatgagcaaagaaaatggatttccgagtgggaaaacgaatagattctattgcgcaggtgatgaagatatgataagatactacttgtggcttaaggaggcttatccttcagaagcttgaaaacgatgttccgctgtgccttgcagttgtggccaagagcatctgttggaaggagttgaaaacgatgcaaaaactaattcaagatatcacaaaagaacagcttcgcactgatcttcctgcgttccgtcctggtgacactttacgtgtacacgtaaaagttgttgagggtaaccgtgagcgtatccagatcttcgaaggtgttgtgatcaagcgtcgtggtggtggaatcagcgaaacgttcacagttcgtaagatttcttacggtgttggcgttgaacgtacattccctgtacacacaccaaaaatcgcgaaaatcgaagttgtacgttacggtaaagtacgtcgcgctaagctttactacctgcgtgaacttcgcggaaaagcggctcgtattaaagaaatcagacgataatgataacgaacgaaaagagcttgttacccgtaacaggctctttttttatatgaaatttgtaaaagcggaacaagcaacgtaaaatacataagagatcatcggaacatccggttccggtaaataaggcaggtgtcgaagtcacatgaccattcaatggttcccgggccatatggctaaagcgagacgggaagtaacagaaaaactgaaattaattgatatcgtatacgaattggtggatgcgagaatcccgatgtcatcgagaaatccgatgattgaggagattttaaaaaataagccgcgcattatgcttttaaataaagccgataaggcggatgcggctgtgactgcccagtggaaggaccactttcaggaacagggcattccctctctttcaataaactccgttaacgggcagggactgcatcaaatcgtgccgtcctcgaaagagctgctgaaggataagttcgataaaatgaaagcaaaaggtgttaggccgagagcaatccgcgcattaatcatcggcattccgaatgtcggcaagtctacgctcattaaccggctggccaaaaaaaacattgccaagacgggagacaggcccggcattaccacttcacagcagtgggtaaaggtaggcaaggaattagagctgctcgatacaccgggaattttatggcctaaatttgaagatgagcttgtcggcttgcgcctggcgatcaccggggcgattaaagatacgattatcaacctgcaggatgtggctgttttcgggctgcgctttctggaagagcattatcccgaccgtttgaaggagcgctacggacttcaggaaatccctgaggatatcgccgctcttttcgacgcgatcggtgaaaaacgcggctgtttgatgggcggcggaatggttgactatgataaaacaacggaagttatcattcgggacatccggacggaaaaattcggcaggctttcatttgaagcaccatcagaataaagacgcgcagcgatgcgggtctttattttttccgcagaataccgatatacataatgtaagggagaagagaacgtgaatacattaaccgtaaaaagcgtaaaagaacgcctgcaagagatcagggacgaaagcgaccccttccttgcccaatgtgagaaagacccgagaaaaagcgtacagacgcttttagagcaatggctgaaaaagcatgcgaaggaaaaagctcttaaagagcaatggctggacatgacggcatacgaaagactgtcatccaaaaagggcttccgcctgattgcgggtgttgacgaagccggaagagggccgcttgccggaccggttgtcgccggcgccgtcattttgccggcagaatgcgagattctcggtctcacggactcgaagaaattgtcggaaaagaagctcgaggagtattacagccggatcacggaagaagcggcggctgtaggagtcggcattgtccatgcggacgtcattgaccggatcaacatttatgaggccgcgagactggcgatggtaaaagccgtcaatgctttaacggaaacacctgattatctgcttgttgatgccatgacccttccgcttgacattccgcagtcatcagttataaaaggggatgccaaaagcgtgtcaattgccgccggagcctgcatagcaaaagtaacgcgggaccgtctcatggctgagtacgccaaaacttaccccatgtacggctttgaaaaaaataaaggctacggaacgaaagaacatcttgaagctcttcaggcatacggaccgacaactattcaccgaaaaacgttcgctcccgttcaatcttattgttagaaaagaggcttaagacatgaacattagcggcgaaatccaagcggctttcagacagctgacggcggaaatccctccggaccggcaggacggcggtaaagacagcggtactcaaaggctgctgttagggaaggttctccgtttgctggacgatcaaagcgctcttatccagatcggcggccggacgatgcagggaaaacttgaaaccgcccttcgtccgcaggcgtattactggttttcttatgacaaacagccggcggaaaaaacgggccggcttcatgtcatcgaccaattcgaaggaagcccgaaaaccgttcaggaagcggcgggtagactgttaaacgctctttccgtcaaaccgggccctgtgtctctgcatattgccgaaacgtttatgcagcagaagctgccgatgacggaaaacagcctcaaagcctgcgtccgctgggctgaatcgcttccggccgccgaattgaaaaaagcggcggaaacaatcgtatttgcgctgaaacgggaactgcccgcacatccggaagtcttgtcagccattcatgccgttaaatatccggttccgacccggcgcctcctctcaggactgcttcaggcaatcaatcaggcaccgcaatcggcaaaagagctgtctgtgctcaaagaggcggtttctgacgtattaaacgcggaaacggatcttcatgcagaacgtctcttgaagaagcttgccgaggctgcacgcatgccgatcccagaaaccgggctgatggatgaagaagaacggacggaatcaaaacaatcaccatttgtccgagagactcgtgaaaacggaaaggcagtctcaagccaaccttctcctccgagtgcgcggacagatcaaaaacttcctgaaaaaacggcaaaacagattatagagaaattaatgacatcggcagaaaaaactgaaaaccgccccgtaaaagtaacggcggagatcattaaggctttcatttctcaagaaaaaacatttaaaacagcacctgttcttcaaaaagcacatctgacagaacaggaggcggctgttttcgaaaaagccgttcagctcaccgaattgaaatatgcggaaaaacatgatgtattaagccttttgcagaaaatcaaaaaaggattgggcacgcgtgatgaattatcattcattacagcgcttgaaaaaggcgtatctccgcagccggagaaacaagcgctgaaaacggccctccaagccgtccggacgcttcaagaagcgccccaatccgttaaacaagaggcggaaccgcttattcataaattaaacggccagctgtttattgagcagcataacccttcttttacgcagatggtgctgtcatttccgctgggagcgtccgcgtatgagaatgacatcacagttctctttaaaggacggaagaagccggacggaaaactcgatccgtcacattgcaggctcctgtttttgctgcatcttgaaacactgcaagaaaccgttgtggactgcgtgattcagcaaaatgtaatgaccattacggttgagactgattttgagcttcaggcggccatcgaccctctcgtaccggctttaaaagaagccgtaaaagaaacgggcttcagcctgtcaggcgtcacgtctaaaaaacggcgcccgaaagaccagagcgctcttgtggaagagtttatagaaaaagacggcggaagaaaagtggatgtgaaaatatgaaagagcaaacgccgttaagaagagctgtcgccctgcattacgaccggcagaaagaccaagccccgaaggttgtcgcaacaggcagggggcacgtggcggaaaatattataaaagaagctgagaaggctggggtccccattcaggaagacagaacccttgtcgaattaatgcgccatttgacggttgacgatcacataccggaggcgctctatgaaaccgttgccgaaattttttcatttgtttacagactggacaaaaccctgaaaaacgaaaaataaggaccattcatttcccggactccgtttaaatttatattttcaataaaataaaagttagaatgtttggaaggatataaagattttgttttgaaccctagacaattcttccagtattatatagaatgaaagcgcagtctatttttagttttgctacataagttaggaggatgggaaatgaatatccatgagtaccagggaaaagaagtcctcagaaaatacggggtgtctgttcctgaaggtaaagtggcttttacagcagaggaagcagttgaaaaagcagagagcctgtcaagctcggtttatgtcgtaaaggcgcaaatccatgctggcggccgcggcaaagctggtggggtaaagattgcaaaaacaaaagatgaagtgaaagagtatgccgaagaactgttaggcaagacgctcgtcacacatcaaacgggtccggacggacaagtaataaaacgcttacttattgaagaaggctgcgatattaaaaaggaatactatgtcgggcttgtacttgaccgcgctacttcaagaatcgttttaatggcgtctgaagaaggcggaacggagattgaagaagtagcggaaaaaacacctgaaaaaattaaaaaagcggtaattgatccggctgtcggccttcagggctatcaggcaagggaaattgcattcgcaattaacatcccgaaagagcttgtcggcaaagccgctaaatttatgctcggtttatataaagcatttgttgagaaggactgctccatcgccgagatcaaccctctcgtcgttacgggggacggaaacgtcatggcgctggatgctaagctgaacttcgacagcaatgcgttatacagacaaaaagacattatggaatacagagatttagatgaagaagatccgaaagaaatcgaagcgtcaaaatacgatttaagctacatttcccttgatggaaatatcggctgtatggtaaacggcgcgggtcttgcaatgtctacaatggatatcattaaacactacggcggagaacctgcaaacttccttgatgtcgggggcggcgcaaccgcagaaaaagtgacggaagcttttaaaatcattctttccgatcaaaacgtaaaaggaattttcgttaatattttcggaggcatcatgaagtgtgatgtcatcgccgagggcgttgttgaagcgacgagacaagtcggattgacattgccgctggtcgtgcgccttgaagggacaaacgtagatttaggaaagaaaatcctgaatgaatcaggcttaaacatcacatctgcggaatcaatggcagacggcgcacagaaaatcgtatccttagtttaggaaagaatgaaaggcaggggaccagataatgagtgtttttatcaataaagatacaagagttattgtacaggggattacaggttctaccgctttatttcatacaaagcagatgctggaatacggcacgaatatcgttggcggtgtaacacctggaaaaggcggaacggaagcggaaggcgtaccggtattcaatacggtcgcagaagcggttcatacaacgggcgctgatgcgtcagtcatttacgtgccggctccgtttgcggcggacgcaattatggaagcggttgacgcggaaattgatcttgtcatttgtatcactgagcacattccggttttggacatggtgaaagtgaagcgctttatggaaggcaagaaaacgagattaatagggccgaactgcccgggtgttattacacctgaagaatgcaagatcggcattatgccgggatacattcataaaaagggtcatgtaggcgttgtatcccgttcaggaacattgacatacgaggccgtccatcagctttcagaagccggcgtaggccagtctaccgctgtaggaatcggcggcgatccggtcaacggcacgaactttattgacgtgttaaaagcgttcaatgaagatcctgaaacacatgccgtcatcatgatcggagaaatcggcggcacagctgaagaagaagcggctgagtgggtgaaagcgaacatgacgaagcctgttgtcggctttatcggcggtaaaaccgcgcctccgggaaaacgcatgggccatgcgggcgccatcatctccggaggaaaaggcacggcagaagaaaaagtcaaaacgatgaacgcctgcggaattgaagtcgcggaaaccccttctgtaatgggtgaaacgctgattaaggtgttaaaagaaaaaggcttatttgaaacgtgcaaaacgcactgatcgaagcaggggcagccgtaacggctgttcctgtttttgctgaaaaaagaggaggttgccagatttggatcaagcatcgcgctgtttaatggtctgcagtattaatcaaatcatttccccgtctcttctattaaaatggtggaaagctgatcactctctgtcttttttttcggatccgcatccattaactgttttatcagaggggaaaacagccccggaagcaatttttcgggaaatagagcgcaaggatccggaacttgatgaagttctgtccgattaccgccgcgaaggcattactgttattccgatttcatcaagctgctacccaacatggcttaaagcgatttatgatccgccggctgtcttgtatgcaaaagggaacacaccgcttcttgaaaaaggcagaaaaatcgggattgtaggaacgcggaaaccgacggaagacggaataaaagcggctgggcatctttccgccgaactctcaaaaaaaggctgggtcattgtaagcgggcttgcatccggtatagacggtttgtctcataaggcgagcatcagggcaaaagggcttacgatcggcgtgatagccggcggattccatcacatctatccccgggaaaatctcctgttagcagaatacatggctgaacaccatctcctactctcagaacatcctcctgaaacaaagccgaaaaaatggcactttccgatgagaaaccgcataatcagcggactaagtgaaggaattgtggtcgtgcagggaaaagaaaaaagcggttcattaatcacagcttaccaggccctcgatcaaggcagagaggtatttgccgttccgggttccatatttaatccatattccggaggacctataaaactcattcaagaaggggcgaaagctgtattatgcgcagaggatattgacggagagctgaccgcccgatgcgttcagtatacggaacccttttgaaatatcgtttgacaaacggtattgtaatatttaataatagtgaggatttaaagttgcatattattttcatgtataaaatgacgttcatcataaagaatgaaatgttgaaagccataaaaaggcagctctaaaatgaattgatacttgaaaagagagagaacacctcttgagggggatgaaaatgtctgattatctagtcatcgtggaatcgccggcaaaggcgaaaacgattgaacgttatttagggaagaaatataaagtcaaagcttcaatgggacatgtccgggatcttccgaaaagtcaaatgggagttgacatcgaacagaactttgaaccgaaatatattacgatccgcggaaaaggccctgttttaaaagaattaaaaacagcggcaaagaaagcaaaaaaagtctatctcgcggccgaccccgacagagaaggagaagcgattgcatggcatctcgcacacagccttgatctggatctcagctcggactgccgggtcgtctttaatgaaataacgaaagacgccattaaagaatcatttaaacatccgcgcatgattaacatggatcttgtcgatgcgcagcaggcgcgccgcatactagacagactcgtcggatacaaaatcagcccgattctttggaaaaaagtaaaaaaaggcctcagtgcgggccgtgttcaatccgttgcgctccggctgatcatcgaccgggaaaaggaaatcaatgactttaaacctgaagagtactggacgattaccggctcatttttaaagggaaaagagacgtttgaagccggatttttcgggaaaaacggcaaaaagcttcctttaaaaagcgaagaagacgtaaaagccgtccttgctcagctgaaaggcaataagtatacagttgacaaggtgacgaaaaaagagcgcaaacgaaatcccgctctgccgtttacaacgtcaactctgcagcaggaggctgccaggaagctgaatttcagagcgaagaaaacgatgatgatcgctcagcaattatatgaaggaattgatctcggcaaagaagggacagtcggactcatcacgtatatgagaacggactcaacgcggatttccaatacagccgttgaagaggcgtcagcttttattgatcaggcatacggaaaagagtacttagcgggaaaacggaaaccggcaaagaaaaatgaaaacgctcaagatgcccacgaagcgatccgcccgacttcggtgctcagaaaacctgccgacttaaaagcggtgcttggaagagaccagctcagactatacaagctgatttgggagcgttttgttgcaagccagatggcgcctgccgtacttgatacgatgagcgtcgatctcagcaataacggattgacattccgggcaaacggaagtaaagtcaaattcgccggcttcatgaaagtctatgtagagggtaaagacgatcagctggaagaaaaagaccgcatgcttccggaccttaaagagggagacacggttttatcaaaagatattgagcctgagcagcactttactcagccgcctccgcgttacacagaggcgcgcctggttaaaacgcttgaagaactggggatcggccgtccttcgacatatgcgccgactcttgacaccatccagcgccgcggttacgtgggattagacaataaacggtttgtgccgactgagcttgggcagatcgtgctggatcttatcatggagtttttcccggaaatcatcaacgttgaattcacggctaaaatggaaagggaccttgaccatgttgaagatggcgagacagaatgggttcaaatcattgacagcttctataccgatttcgaaaaacgcgtgaaaaaagcggaagctgaaatgaaagaagtggaaattgaacctgaatacgcagatgaagattgtgaattatgcggctcccggatggtttataaaatgggccgatacggtaaatttatggcgtgttccaacttccctgactgccggaatacaaaaccgattgttaaacaaatcggcgtaaaatgtcctaagtgccatgaaggaaatattgtcgaacgaaaatcaaaaaagaaacgcgtcttttacggctgtgaccgttatcctgaatgcgacttcgtatcttgggacaaaccgattgaacgaaaatgcccgaaatgtgaaaatatgctcgtagagaaaaagcttaaaaaaggcatacaagtccaatgcgtcgaatgcgattataaggaagaaccacagaagtagcggtgagcagagccttgctcaccttctttgtgtggaagggacaaacaacaggagatgaaaagaaatgaaccagcaaacagttaatgtaatcggagcaggccttgccggaagtgaagcggcatggcagcttgcaaaacgaggaattcaagtaaaactatacgaaatgcggcccgtcaggcagacggcagcccatcatactgataaattcgctgaactggtatgcagcaactccctccgttcaaatacactcgccaatgcggtaggcgtattaaaagaagaaatgcgggcgcttgactcagcaatcattcaatctgctgataaatgctcggttccggcagggggagcgcttgccgttgaccgccatgaatttgcgcaaagcgtgacggatctcgtgaaaaaccatccgaacgtaacggttcttactgaggaagtaacagagattccggaaggcccgacggttatcgcgaccggaccgcttacatcagaatcgctttcacagcagctgaaagagctcacgggagaagagtatctgtatttttatgacgcggcggcgccgattgtcgaaaaagacagccttgatatggataaagtgtacttaaaatcccgttatgacaagggagaagcggcatacttaaactgcccgatgacagaggaagagtttgaccgtttctatgaagcattgacgacggctgagacggttcctttaaaagaattcgagaaagaaatcttctttgaaggctgcatgccgattgaagtcatggcgaaaagaggcaagaaaacgatgctgttcggaccgatgaaaccggtcggactggaagatccgaaaacaggcaagcgcccttatgcagtcgttcagctcagacaggatgacgcggcgggaacgctttataatattgtaggttttcagacacatttaaaatggggagatcaaaaagaagtgctgaaactgatccccggccttgaaaatgttgatatcgtcagatacggcgtcatgcacagaaacacatttatcaactcgccgagccttttgaacccgacatatcaatttaaacagcggaacgatctgtttttcgcgggccaaatgaccggtgtagagggttatgttgaatctgccgcttcaggtcttgtagcgggaatcaatgccgccaaacttgtgctcggtcaggatcttgtgacattcccgcaggagacggcgatcggaagcatggctcactacattacgacgacaaatcagaagaacttccagccgatgaatgcaaacttcggcctcttaaaagaattgcctgtaaaaattaaaaacaaaaaagaacgaaatgaagaatacgctaaacgcgcaattgagactattcaaactatttcgaaaacgatatagcttttcattgcaacttcgatgcattatatgataccatttaaaagcccttcggagagggaggtcttcataatgactgagaatgttaacttttttttaaagttattcgttgaatatttacaaattgaaaaaaattattcacaatatactattgtgaattatgttaattcgattgaagaatttgggatgtttctgcatgctcaaaatataaatggaatgaaagaagctgcatatcatgatgtgagaatatttttgacagaggcttatgaaaaaggcctgtcaagaagaacaatcagcaagaaaatttcagctttgagaagcttctataaatttttaatgagggaaaagcttgttgaagagaatccgtttcagcttgttcatctgccgaaacaagagaaacggattccgaagtttctttatgaaaaagaacttgaggaactattcgctgtctcagacagaagtcagccgtcagggatgcgcgatcaggccctgcttgagcttctttatgcgaccggaatgagggtcagtgagtgctgtacgctcactgtcggcgatcttgacctgttcatggatacggtgctcgttcacgggaaaggcaagaagcagcgctatatcccgttcggctcatatgcccgtgatgcgctggagctgtatatcaacagcggaaggcagtgcctgcttgaaaaagcaaaagagcctcatgatgtgctgtttgtcaatcaaagaggcggcccgctgaccgccagaggaatccggtatattttaagcgggcttgtaaaaaaagcatccggcactttacatatacacccgcatatgcttcggcacacgtttgcgactcatctgctgaatgaaggggctgatttaagaagcgtccaggagcttttgggccattccaatctgtcttctacgcagatatacacgcatgtatcgaaggaaatgctgagaaacacatatatgtcccaccacccgagagcttttaaagaaaattaaaaggaggcccttctcatgtcatcttttcatgcgacaacgatttttgccgtccagcataacgggaaaagcgctatgtcaggagacggccaggtcacattcggtcaggctgtagtcatgaaacataccgcgagaaaagtgagaaagctgtttaacggaaaggttctggccggatttgcgggatctgttgcagacgctttcacactttttgaaatgtttgaggcgaagcttgaagaatacaacggcaatttaaaacgtgcgtcggttgagcttgcgaaagaatggcgcagcgataaagtgctgcgcaagctggaagccatgctgattgtcatgaaccaggataccttgcttctcgtatcgggaacaggtgaagtgattgagccggatgacggaattttggcaatcggctccggcggaaactacgccctgtcagcaggaagagcgctgaaaacctatgccggagagaatctgtccgccaaagatattgcaaaagccgctttgaaaatcgcaggcgagatttgtgtgtacacaaacgatcagatcattttggaagaacttgaatagaaaggacttgaggcgcatggaaaacaaaccgttaacaccgagacaaatcgtagatcggttggatcaatacattgtaggacagcaggatgcgaaaaaagctgtcgccgtggcattaagaaaccgctatcgcagaagtcttcttgatgaaaaactgagagacgagatcgttcccaaaaacatcctgatgatgggcccgaccggggtggggaaaacagagatcgccagacggatcgccaagcttaccggtgcgccatttataaaaattgaagcgacaaaatttacagaagtcggctatgtaggcagagatgtcgaatcaatggtcagagacctcgttgagacatccgtgcggctcattaaagaagaaaaaatcagcgaagtgaaagaacaggctgaagaaaatgcaaacaaacgtatcgtgcggcttctcgttccgggaaagaaaaaacaagcgggtgtgaaaaatccgtttgaaatgcttttcggaggaagtcagacggcaaatgatgatgaagccgatcagcaggaagaagcaagccttgaagaaaaaagaaaacgcatggcgcatcagctcgcattgggagagctcgaagaccattacgtctccgtagaggtggaagagcagcagccgtcgatgtttgacatgctgcaaggctccgggatggagcagatgggcatgaatatgcaggatgcgctgagcaatctgatgccaaaaaagaaaaaacgccgcaaaatgacggtcagagaagcaaggaaggttctgaccaatgaagaggcaggcaaattaatcgatatggatgaagtcggccaagaggccgtgttaagagctgaagagggcggcattatctttattgacgaaatagataaaattgcaaaaaacggaggggcttcttcctcagcagatgtatcgagagaaggcgttcaaagagatatccttccgattgtcgaaggatctaccgtcgtcacgaaatacggctccgtcaaaacagatcacgtgctgtttatcgcagccggggcattccatatggccaaaccgtctgatctgattccggagctgcagggccgctttccgattcgtgtagaattgagcaagctgacggtggatgattttgtgaagattctcgtcgaacccgataacgcgctgttaaaacaatatcaggctttattgcagacagaaggtatatctcttgaattttctgacgaagctattcgtaagatcgccgaagtggcttatcatgtgaatcaggatacggacaacatcggagcgagaaggcttcacacgatattggaacgtctcttggaagacctgtcgtttgaagcgccggacgtgacgatggaaaaagtcgccatcacgccgcaatatgttgaagaaaagctcggaacgattgcaaacaacaaagatctaagtcaatttatattgtgaaaatttaataagaggaattctaggaggattatttatcatggctttactacaaaaaacacgaattattaacagcatgctgcaggctgcggcaggcaaacccgtaaactttaaagaaatggctgaaacgcttcgtgacgtcattgattctaatattttcgtcgtcagccgcagaggaaagcttttgggctactctattaatcagcagattgaaaatgaccgcatgaaaaaaatgcttgaagaccgccagttcccggaagagtacacgagaaatctgttcaatgttccggagacgtcttcaaaccttgatatcaacagcgaatacacggcatttcctgtggaaaacagagacctgttccaagcgggcttaacaacgatcgtgccgatcatcggcggaggagagagactgggcacgctgattctgtcccgtctgcaggatcaatttgaagatgatgatctcattcttgctgaatacggagcaaccgttgtaggaatggagattttaagagaaaaagcggaagaaatcgaagaagaggcgcgaagcaaagcggttgttcaaatggcgatcagttctctgtcttacagtgaacttgaagcgattgagcatatctttgaagagcttgacggaaacgaaggcttgctcgtggcaagtaagattgcagaccgtgtcggcattacgcgttcagtaatcgttaacgcgctgagaaagctggaaagcgcaggcgtcattgaatccagatctctgggtatgaaggggacgtacattaaagttctgaacaacaaattccttattgaattggaaaaccttaaatctcattaagacaaaagcaggatccctgaaaatgggggtcctgctttttttatggacaataggtgaaaagttgcagtttaaagttgcttattggaagctgatctgagataatccatcttgctgtgtgaaaaaaggaggaagatacagaaattctgctattttcagtcttatattaaacaaatacttgtagtccaaatactctaggacttaatacctacatgcaaaatagatataattgagcacttttttttagcctaacttcatagactttaagcctgttatttcttacaataagcatatggttttacaattctcgacaaggatttttaggagaaaaatatctgaaatggaggtaagtggatttggacttattttctggaactatacaaaatcttgagaatgccttggggagagcggacattaagcaaaaagtcttaactaataacatcgccaatatagatacaccgaactataaggcaaaaaaagtctctttccgaaatttgttagatcaggaaacatccaatcttgaggcggtaaaaaccgactatcggcacgttgactttacgggttcaagggacgattattctatcgtgtccagcagtgatacatcgtaccagcaaaacggaaacaatgtcgatatcgacaaagaaatgacagatttagccgaaaaccaaattaattatcaggctttggttgaaagaatgagcggcaaattcaattctctgaaaaccgtcttgacaggaggaaaataatgagtggctttcaaagcttaaatatttcgggttccgctttaactgcacagcgtgtccggatggacgtcgtatcgtccaacctggccaatatggacacaacgagagcgaagcaggtaaatggcgaatgggtgccttacagaagaaagctggtatctctccaatccggaggcgaatcattttcgtcccttttacattccaagatgaacggaacaggaagcgcgggaaatggcgtaaaggtatctggcgttacggaagacccgtccgcttttaatctcgtttatgatccggagaatcctgatgcgaataaagacggatatgtacaaaaaccaaatgtagacccattaaaagaaatggtggatcttgtcagcagcacgagatcatatgaagcaaacgtaactgcattaaacgcctccaaaggcatgcttttaaaggctttagaaatcggaaagtaaggtgatgtaagtggttaacgctattactccttttcagcttcaacaaacccaaaacactcaaaacgtaacgaatcaattaaaccaaactcaaaaaactgattcttcaaaccaaacaagcttttcggagcttttaaaaaactctattgattcgttaaatgagtcacaagtaaaatctgaccaaataacgaacgaactggctgcaggaaaggatgtaaaccttgacgaggtcatgatcgctgcccaaaaagcaaatatttctctgacggccgctaccgaattccgcaataaagccgtggaagcctatcaggaaatcatgagaatgcagatgtagtggtcagattgaagagaatgactggaatgaccgggggttaacatgaatcgtactctaatgcaaatgaaaaccaaaacggcagcgttttggaacaacagatcaaaaacacagaagatactcatggtaagcggcttggccgcattcattattttactcatcgtcgttattatttttacttcgtctgaaaagatggtgcctctttataaagatttgtccgcggaagaagcggggaagattaaagaagagctcgatacgaaaaaggtgtcttctgaacttgctgacggcggcacggtcataaaggttcctgagagccaagtggattcgcttaaagtccagcttgccgcggaaggcctgccgaaaacgggatcaattgattattcgtttttcggacaaaatgcgggcttcggcctgacagataatgagtttgacgttttaaaggttgaggcgactcagaccgaattgtcaaacctgataaatgaaatggacggtattaaaagctcgaaggtcatgatcaatatgccgaaagaagccgtgttcgtcggtgaagatcagccggcagcgtccgcatccatcgttttgcagatgaaaccgggctactcgcttgatcaaaaccagatcaacgggctgtaccatctcgtttctaaaagtgttccgaacttaaaagaagataatatcgtcataatggatcaaaattctacatattatgacaaaagtgacagcggtgcagggtccgtttctgacagttatgcatctcagcaaggtattaagtcgcaggtcgaaaaggacattcaaaaacatgttcagtcactgctcggcacaatgatggggcaggataaggtcgttgtttctgtaacggcggatattgacttcacgaaggaaaaacgcactgaagacactgtcgaacctgtcgataaagataacatggaaggcatagcggtaagcgccgaaaaagtcgcggaaacgtataaaggcgatggcgcggccaacggcggcacggccggaacgggaagcaatgacaccgcgaactatgccgagacaaacggcggttcaaacagcggggactacgaaaaaagcagcaataaaatcaactatgaagtcaaccgcattcataaagaaatcgcggaaagcccgtataaagtgcgtgatttaggcattcaggtcatggtggagccgcctaatccgaaaaatgccgcttccttatcggcacagagacaggctgatatacagaagattttaggaacggtcgtcagaacgtctcttgataaaaacgaaacgcaaaatcaaaacctgacagacaatgatatcaacaataaaatcgttgtatccgttcagccgtttgacggaaaaacaagcctgaacacagattcggcacaatcttcaggtcttccgatctgggtatatattacaggcggcgtactgcttgcggccattattctgcttatcattctcctcatcagaaagaaacgctcacaagaggatgaatacgaagaatatgaatatgaaacaccgccggagccggttcgattgcctgatatcaacgaagagaaaattgaaacggaagaaacagtcagacgaaaacagcttgaaaaaatggctaaagaaaaaccggaagactttgctaaattgcttcgaagctggctggacgaggattagggggaatggaaaatggcgaaacgtgatcagaacaagcttacaggaaaacaaaaagcagccatcctcatgatttccttaggccttgatgtatcagcttctgtgtacaagcatttgtctgaagaagaaattgaaaggttgactctcgagatttcgggagtcagaagcgtcgatcatcaaagaaaagatgaaatcattgaagaatttcataatatcgcaatcgctcaggactatatttcacaaggcggtttaaattacgcccgccaagtgcttgaaaaagcgctcggagaagacaaagcggtaagcattttaaacaggctcacctcttctttgcaggtaaagccgtttgattttgcgagaaaagcggagcccgaacagattttaaatttcattcagcaggaacatccgcaaacgatggcgctgattttatcctaccttgacccggtgcaggccggacagattttgtctgagctgaacccggacgttcaggctgaggtggcaagaaggattgcggttatggacagaacgtctcctgaaatcataaatgaagtggagcgggtccttgaacaaaagctgtcctcctcctttacgcaggattatacgcagaccggcggcatagaagccgttgttgaagtgttaaacggcgtagacagaggaacggaaaaaacgatccttgattcattagaaatccaagatcctgaattggcggatgaaatcaaaaaacggatgtttgtctttgaagatattgtcacccttgataaccgtgcgattcagcgcgtgatcagagatgttgaaaacgacgacctcctgctttcattgaaggttgcgagcgaggaagtcaaagagattgtcttcagcaatatgtcacagcgtatggttgaaacatttaaagaggaaatggaaattatggggcctgtgcgtttgcgtgatgtggaagaggcgcaatcaagaatcgtgggcgtcgtccgcaagctggaagaagccggagaaattgtaatcgcgcgaggcggaggagacgatattattgtctaatatcattaaacagcaaacatcattttctcctgaacaaaaacggcgcaagctatccttgcaggaagtcaggaaaacacattcccagccagaccgggaggaacctgaaaatccggaggcactcatggcctttgccaaggccgaagccgacagggtgtctgaagaagcgaaaagtcaattggatcacactcttcggcagattgaagaagagaaaaaccgctgggcggaagaaaaacaaagattgattgaagaagcgaaggcagaaggatataaagaaggcatggcattgggaaaagccgatgctcaagcagaatatgccaatctcatcagccgggccaatgccgttatggaaatggccagacaatcagtcgaggaaaaactggaaagcgctgaggaagaaattattgagctttctgttgcgctcgctaaaaaagtatggcggcaaaaaagtgacgataaagaggctttccttctgctggtcaaacaggtagtagccgaagtaaaagattatgatgacatctccatctatgtggaccctgaatattatgagacggttcatcagcatatggacgaaattcagcagctgttatacaaagaatgcagattaagcttatatgccgatgaaaaagccgcgaagggaacgtgctcgatagaaactccgttcggacgtgttgatgcaggcatagacactcagctgatgcaattaaagcaaaagcttttaacggcgcttgaggcgggagcggagcaatgaagacacagtatttaatagactcaattgaaacagcggatccgtacaaacgctacggcaaggttaaacgggtcatcgggctgatgattgaatcaaaagggcccgaaagctcaatcggagatgtttgtctcatttatccgaaaggccatgcgaaaaaagcgattaaagctgaggttgtaggcttccaggatgaaaacattctgctaatgccttatctggaagcggccagcatagcgccgggcagcattgtggaggccactggcgagtcgctccgcatcaaagtaggggcgggtttaatcggacaagttgtcgacgcgttcggcgaacctcttgacggccgggcgcttccgaaaggtttgtcccccgtttcgacggaacagccgccgccaaacccgatgaaacgcccgccgatacgggaaaagatgggtgtcggcgtcagatcgattgacagtctgctgacggtaggaaaagggcagagaatcgggatttttgccggaagcggagtcggaaaaagcaccttgatgggaatgattgcgaagcagactgaagctgatttaaacattatcgcacttgtcggtgaacgggggcgcgaggtgcgtgaattcatcgagaaggatttaggcgaagaaggcctgaaacgctcgatagtcgtagtcgcgacctctgatcagcctgcgttaatgcgattgaaagcggcgtatacggccaccgccattgcggagtatttccgcgataaaggccggaatgtgatgttcatgatggactccgtcacgagggtcgcgatggctcagcgggaaatcggcctggcagcgggagaaccgccgacaacaaagggatatacaccttctgtgttcgctattttgccccgtttgctggaaagaacgggcgcaaatgaacaaggaacgataaccgctttttatacggttctcgttgacggagatgacatgaacgaaccgattgccgatacggtgcgcggaatattagacgggcatatcgttctcgatcgggcgcttgccaacaaaggacagttcccggccgtgaacatcctgaaaagcatcagcagggtcatgtctaatatttcagacacagcgcacatagaggcggccaacaaattccgcgatcttctgtcaacttatcaaaactctgaagatctcattaatatcggagcttacaaaagagggtcatcaagagaaattgatgaagcgattcagttttatccgcagcttattcaatttttaaaacaaggaacggaagaacctgctcaattggaagacagcattgcggcattgacgagtctgacaggaaaagaggaataaacatcatggcgtaccaattcagatttcaaaagctgctggaattaaaagaaaatgaaaaagaccaaacattgactgaatacagacaatcggtttctgaatttgagacagtggctgaaaaactatatgaaaatatgagcaaaaaagaattgctcgaaaaagacaaagaatcaaagctgaaatgcgggatgagcgttcaggaaatgagacattatcagcaattcgtttccaatcttgagaacaccatctatcattatcaaaagcttgtcatcatgaaacgaaatgaaatgaatgagaagcaggaacagctcaccgaaaaaaacattgaagtaaagaaatttgaaaaaatgcgggaaaaacaatttaatatgttcgcacttgaagacaaagctgcagagatgagggaaatggatgacatttcaatcaagcagtttatgattcaggggcattaggagcgaatgaaatggccgaaaaagaaaagagatctggaaagttcggttcaatcctgctttttatcatgatcccgctgatttttctgatcatcgtcgcaagcatcatcctttgggctgccggcgttgatgtgatgaagccgattcaggaaacagccgctaaaacgcctgttttaaaagaattggttcccgaaacgaaagaaatgaaaagcgcggcggaaaagcagaaggaagacagaacggcttctcttgaaaagaccataaaggaacaaaaaagtgaaattaacattttgaataaagatttagatacaagcaagtccgaaatcgataatctgaatcagaaaatccgttcgctgaaacaggaagctgaacagcagcagaaaacgaagacggatgaaacgaaaaaagacgcttcggattcagccggaaaagataaaatgatcaacatctataaaagtatggacagcggtaaagcggcaagcattatcgtaaagctgaaagaaaaagaagccctcgatattttaaacggattaagtaaaaagcagcttgctgaaatcttgacgaaaatgactcctgaacaagcggctaaatatacagaaaaactatccgctgacggaaataaggagtgatgtaagttgaagctgcttgaattaacgggtaatcgtacgcagactgcgcaaaacagcaatgtgaagatgaatgtaaacagcttaggtctatttcagaactggctcctgtcggaaatcacttctccccggcagcccggagatgaaacaaaaacaagtgacgcagagctgaatgatgccctatcgaaaatcggtgattggctgaaagccggcccggaagataaagaattgcagcttaaacagctgcttgaggcggtaaaagctcttgaaggaaagcagacggctgaaacagctcttcctttattgaaacagcttgccgaatccgttgaagacatgttagcgggaaaacagcatggggcgaagcctgaaacgaatgagccggattcttccgcaaaagacggggattccgtcaaggatgcgcttgagaagggcctgcttttcattcaagaagccgtattccagctcttcacatctcagcaggaactgccggacagcacgcaggcaaaggcggtttaccaggaaggcgcccgtttattagaggcattgaaaaaacaaggtgttccggaccgcgtgattcaagacctgcggcagacattttttccgaaaaacgaatctgcatctaaactttactccatgacagccgctgagctgaagagctttcaaagcgtcgcggagcagcttgcgggcctttctcaaaagggaacaaaggaatgggatatggctgaaactgagctgaaagcttttgtgttatctcaatcatctgaatcatcccaagagtcagccgggaaaacggaacagcaaaacggcggcacggtttctcacgcaaaggcgcctgacagcaaattgtctgcacatatactgttttcgggaacgagaagccttgccggcattcagcaagcgtccgcaggagctgaacagcagccggcagaaaataaaccgttaacggatcaggtcatcagcggctggaaacagatgaaatacacgcctttcgggaaaacaaccggaagctttacgattcgtcttaatcccgagaacctcggatttgtcacaattaaggtgacaaacgaaaacgggatgtttcaaagcaaaataatcgcatccagccagtccgcgaaagagctgctggaacagcatcttcctcagctgaaacagtcgcttccgaatatgtcggtccaggtcgaccgttttacagtcccgcttcaaggcggggatcagcagcctgtttacgggcagacggccgatcacaataaacagcagcatcagggacagagagagcagaagaacaagcagcagtcaggcgatttcggagatatgctggaggagctttctctcaatgaaatggaggaagaataggtgacatcagtaaactcggattatgccgcggcgggcgcttcaaccacttcaaacgcgaagagcacctccgcagtaaacagcagtacgaatttagggaaagacgaatttctgaagatcttaatgacacaggttcaaaaccaggacccgctcaatccggttgatgacaaagaattcatcagccagatggcgacattttcttcattggaacaaatgatgaatatgaatacgacgatgactaaatttgtagaaaatcaagatccgtttacgatgtatgtgaactggatcggcaaaaatgtcacattcagcgacagcgacgggaaggatcagacaagcccagtcaattcagtcaagcattcaaacggcaattacgtgctcgtgcttgaaaatggcaaagaggtcagtccgtggaatgtcacggccgtcagcgaaacatctaaataaaaagaaacccagggggaatttaacatgttacgttcattatattccggtatcagcggcatgaaaaactttcagacaaaactagatgtaatcggcaataacatcgccaacgtcaacacagtgggatttaagaaaagccgcgttacatttaaagatatgatcagccagacagtcgccggcggttcaaacgtgaccaattcaaaacaaatcggcctgggtgccgcgacttcttccattgatgtcgttcattcaaccggcgccccgcaggctacacagaataaaaccgacctagccattgacggagacggctactttcagattaatacaggttcgggaatcgtttacacacgtgcggggaatttcggaaaggacaatcaaggcaaccttgttacgactgacgggtactaccttgaaaaaatcggcggcggcaaaatcaatattccgactgatgcgaaagattacagcatcggtgcagacggaaccgttacatacactgatgcaggggatgcggttcatgatgccggacaaatcggtctggtcacgttccctaacagcgccggtctggaaaaaatcggaggcaacctttacagagaatcattaagttccggagctgcgagcgcagtcaccactccgggcgaaaacggaacgggtaagcttttggcaggctatcttgaaatgtcaaacgtagatctgacagatgaatttaccgaaatgatcgttgctcagcgcggtttccaatcaaactcaaaaatcattacgacttcagatgaaatccttcaggagctggttaatctgaaacggtaaggagggaggagaggcggttaggccgcttctccggattgcatgattcaagtcacccgtttaaacggccagccttttacgctgaacgcgctgtttatcgaacagattgagtgcttccccgacacgacgattacactgtccaacggcaaaaagttcgttgtgaaagaaccggaagaagcagttctcaaaaaagtcatatcgttttaccatagcatacaaatattttcactggatcagggaatagaggaagaagaatgaagaaaaaattagtcatcattttgctgattattttaattgtcatcgccggcctcggaacggcagcatattttgtcgtcagcggacattccggcaaagataaaaagccgacaattgacgaagtcgttgcagccactgtgtctgtcgacgatatcacgacaaacttaaagtctgacagcatcatccgtatcggcatcaagcttgaaaccgactcggctaaagcgaaggaagaacttgaaaaacgcgattttcaggtgaaagacaacatcatttccattttagctgacacaagcgccggagagattgagggagataaaggaagagaagcgtttaaacaatcattaaaagagaaagtaaacagctatctccaagaaggaaaagttcagaaagtgtacattacctcctttaatctgcaataaaaacaaatttgacagaatacggaggtgaagaaaatgtcaggagaagttctctcccaaaatgaaatagacgcactgctttccgccatttccacgggtgaggcggatgcggaagagctgaaaaaggaagttaaagagaaaaaagtaaaggtatatgattttaaacgggctctcagattctcgaaagatcagatacgcagtttaacccggatacatgataactttgcgaggcttctcacaacacacttttccgccaagctcagaacgtatattcatatatccgtcagctcagttgaccaggtgccgtatgaagaatttatccgttccataccgaacatgacgattttaaatttattcgatgttcatccgatggaaggcagaatcatgatggaggttaatcccaccatcgcatacgcaatgcttgaccgcgtcatgggaggcatcggcatcactcataacaaagctgacagccttacggaaattgaaacgaatattatttctaacttatttgaaaatgcactgggcaactacaaagaagcttggcaatcgattgctgatattgaccctgaaatgactgaatttgaagtgaatcctcagtttgtacagatggtttccccaaatgaaacagtcgttgtcatttctctcaatacacagataggtgaaatcagcggtgtcattaatctttgtattccccatgtcgtacttgagccgattatccctaagctttccgtacattattggatgcaatcagaccggaatgaagcgaagcccgaagaaacgaagctgcttgaaaagcgcatcatgacggctcaaattcccgttgtggctctcttgggcgcttctgaactgacaatagaagaatttttaagtttggaagtcggggactgtataactctggacaaatcagtgactgatcctcttactgtattggtcggaaacaaaccgaagtttttagggcaggccggccgggtgaatcgaagacaggcagtgcaaattttagatcacgacataagaggtgaacaagatgaacaatagattatctcaagatgaaatcgatgctcttcttaacggcacaagcagtcagtcagaggatacagaacagcctcaagaggcgaacttgtctgaacttgagcgcgatgcgatcggagaaatcgggaatatttcgttcggcagctcggctacggcgctgtccactcttttaaatcaaaaagtggacattacgacaccgagtgtgaccgtcatttcaaaaagcaaaatcagtgatgaatttcctcatccgtatgttgccattgaagtgaactacacagaaggctttgacggcagcaatttgctcgtcgtcgaacaaagcgacgcggcaatcatcgcggatttgatgatcggcggagacggccggggcgccgatccgtcactcggtgaaatccacctgagcgccgtgcaggaagcaatgaatcaaatgatgggctcggctgctacgtcaatgtcgaccgtattcagtaaaaagattgacatttctccgccaagggttgaacttctggatgtgacggaagaaaaagggaccgacagaatacctgaggatgacctgctcgtaaaagtgtcattccgtctgaaagtcggcgaattaatcgattcgagcatcatgcagctttatccgattacgtttgcgaaagatctgatcgcagacctgatgactgcggaccagcatgagtcagaggccgcagaaaccgcatcagaaccacaggaaacatacgaaacgccgcagccggaacctgccatgcagccggagccgcaggcaaaacccgagcttccgaagagacagggaaccgcaaaaaaagctgctcctgttcaagtcgctccggtagaattccaggcgtttgatcataacgaagcggcgcaaggatcaaggaataaccttgatatgctgatggatattccgctttccgttacggttgagctcggcagaacgaagagaagcgtcaaagaaatccttgaactttctgcgggaagcattattgagcttgacaagctggctggtgaacctgtggacatcctggtcaaccagcggatcgtggcaaagggcgaggtcgttgtcatagaagaaaacttcggcgtgagagtcactgatattttaagtcaggcagaccgccttaacaatttaaaataagcgaacatagaggagagaaacagattatggcacacagaattttaattgtagacgatgcagcatttatgagaatgatgatcaaggatattttagtgaagaacggttttgacgttgtagctgaagcttcagacggagcgcaggcagtcgaaaaattcaaagagcattcccccgacctagtgacaatggatattacaatgcctgaaatggacgggattacagctctaaaggaaattaaacagatcgatccgcaggcgaaaatcatcatgtgttcggctatgggccagcagtcaatggttattgacgcgattcaggccggcgcaaaagactttatcgtgaaaccgttccaagcggaccgcgtgcttgaagccattaataaaacattaagctaaagggtgtacgactgttgaaaaagagtcatggtttactagctttgatttgttatttcgttttactcaatgtacatccgttccctgcttttgcggcagagtctgataattccaccgtcaacgaatggtttgacaaacaatcaacaaacaaaacagagaaaaaaagcgatacatcgaaacaaacggctgatcaagagataggggatgcttctgcatcttctgtctccgcttttgattttgtaaagatgatcggggcgttattattcgtcattctgctgatctatggatttgtcaaactgatgaatagaagaaaccgtctgctgaagccgtttcaatatgtagaaaatatcggcggaacgtcagtcggccaaaatcgttccgtgcagctgattaaagtgggaaacagcgttctcgtagtcggtgtgggcgaaacgatacagcttttaaaagaaatagaagatgaaaaagagcgcgaggcgattctgagccaatacgaagagtcgatgtcttcaaaagtggaatggaccaagctcgtaaatccgcgtaaggatggagaaaaaaagccgcaaacgatgcttccgtcgttttcaaaagcgctgaaagaacagctgaacgagctgaaacaaagccgttctgaaggaaagaagaaaggcccttatcatcatgaatgaattcgttaatctttttaattcaagcaatccgaccgaagtcagctccactgttaaattactgctgcttttgactgtcttttcagtagcgccggggattctgattttgatgacctgctttacgagaatcgtcatcgttctgtcttttgtgagaacctcactggcgacgcagaacatgcctccgaaccaggttttaatcggccttgcgctgttcttgacgttttttattatggcgccgactttttcagagattaataaggaagccttaacgccgctgatggacaacaaaatcagtctcgatgaagcatatacaaaagccgagaagccgattaaagagtatatgagcaagcatacaaggcagaaggatctggcgctgtttatgaactatgccaaaatgaaaaaacctgaatcgattcaggatattcctttgacgacgatggtgcctgcttatgcgatatcagaactcaaaaccgcttttcaaatgggctttatgatttttattccgtttttaattatcgatatggtcgtggcgagcgtcttaatgtcaatgggaatgatgatgctaccgccggttatgatctctctgccctttaaaatattgcttttcgttttggtcgatggatggtatttaatcgtgaaatctttgcttgacagcttttagggtaggtgctaattgtgagttcagaatttgtaatttccatggcggaaaaagccgtatatgtaacactaatgatcagcgggccgctgcttgccatcgcgctgatcgtcggtttgctcgtcagtatctttcaagcgacaactcaaatccaggaacagacgcttgcgttcattccgaaaatcgtggcggtgatgcttggactgatctttttcggtccttggatgctgtcgacgattctttcgttcacaactgatctgttctctcatctgaaccgatttgcagggtagaatcaaatgaattccatcattgatttatttcccgcttttttattggtctttatcagaatctctgctttttttgtaacggtgccggtgttcggacatcggaatctgccggcggttcaccgaatcggctttgctttttttctttcggtgatctgcttcagcacgctgaaacatgcgccggaaatagaaataggggaacagtatatgctgcttgtcataaaagaggccgttgtgggcttgagcctcgggctgattgctttcatgatgatgacagccattcagatagcgggttcctttattgattttcagatgggcttttccatcgccaatgtcattgatccgcaatcaggaacgcaaagcccgctgatcggacaattcgtttatacgctggcgctgttatttatgctcagcgtaaacgcccattatcttttattggacgggatttattacagctttcagtatatcccgcttgatcaggcatttccgtcgtttggaaatgatcactttggactttttatcgcaaaaagcttcaatgccatgttcattatcgcttttcaaatgtctgcgccggttgtggccagtctgtttttagttgatttggcgctcggtattgtggcgagaacggtgccgcagctgaatgttttcgttgtcgggcttcctctgaaaatagccgtgagctttattatgctgatcgtttgtatggcggtgatgtttgtcgtcgtccgcaacatcttcagccttaccgttgaaaccatgcggaatctattggcattggtcggtgtgacatgatgagactcagactgaatctgcaattctttgccggtgaaaaaacggagaaagccactccgaaaaaacggaaggatacaagaaagaaaggacaggtcgcgaaaagtacggatgtgaatacagccgtttctttactgattatctttctttcgctgatcgcgctcggtccttatatgcgggacaggctgctgtcctttattaaaacgttttatacgaaatcgatatcattacatctgtcagcatcttccgtgcatgaactgttcgtagatacggtgaaagatatcagcctcatcctcgcgccgattatgctggtcgcgcttgtggcaggtgtcgtgagcaattacatgcaggtgggttttctgttttctgcggaagttctcaagcctgacttgaataagctcagcccgctgaaaggatttaagcggatttacagcatgagggcgattgttgaactggtcaaatccattttgaagattactgtggtcggttttgccgcctttatggtgctctggctgcattatggcgatattctccgccttccgcttttaacacctgcggaagtgctcactttcgtttctaagctcacgctttggatggggcttgcgggatcaggggctctaatgctgctggccgggcttgattatttatatcagcgttttgactatgagaaaaatatcagaatgtcaaagcaggatataaaagatgaatacaaaaaatcggagggtgatccgattatcaagtccaaaattaagcagaagcagcgggaaatggcgatgaggcggatgatgcaggaagtgccgaaagcggatgtcatcattaccaacccgacccattatgcgattgctttaaaatatgatgaaaagaaaatggccgccccttacattgttgccaaaggggtcgaccatcttgcattaaaaatcaggcagatcgccaaagaacacgatgtcatgacgattgaaaacaggccgctcgcgcgtgcgttatatgatcaggttgacattgaccaggctgtgccggaagagtttttcaaagtcattgcggaaattttggcttatgtatataaaacgaaacaaaaagtatagcgaatttcagattcaaaaggagagaaaaacagcatgtcaacaagagatttatcggttttaataagtgttgtcctcattgtggcaatgctggtgattccattccctccatggttgttaagtattttgatcatcattaatatctctcttgcgttgatcgtgcttctcaccacaatgaatatgcaagaaccgctgcaattctcgatattcccgtcattgctgctgttattgacgctgtttcggcttgcgctcaatgtgtcgacgacacgttcgattctttctcacggagaagggggaaaggttgttgagacattcgggaatttcgttgtcggcggaaatgtgctggtagggcttgttgtcttcattatcttaattattattcagtttatcgtcattacaaaaggcgccgagcgggtatcggaagtggcggcgagatttacgctcgatgcgatgcccggaaagcaaatgagtatagacgcggatttaaatgccggcatgattacggagcaggatgcaaagcacagacgtgaaaaagtcgcccgggaagcggatttttacggcgccatggacggtgcgagcaaattcgttaaaggggatgccatcgcggggatcatcatcgtgatgatcaatattattttcggaatcgtaatcggcatgctgcagcaggggatgagcatacaagaagctgcgtctcactttacaatgctgacggtcggtgacggtatcgtttctcaaatgccggccttgctcatttcaacggctacggggattgtcgtgacgagagcggcatctgaaggaaacctcggtcatgatattacaggccagctgtttgcttatccgaagctcttgtatgtagccgcgggaactgtacttttgctcggtcttcttacaccgatcggcattctgctgacggggccgatcgccggtctgcttgcattcggcgcttatatgctgtccaaagcggataagccgagcgaagaagaggaagaaattcttgaagaagaggctcaggcggatgaactgaaaagcccggaaagcgttgtgcagcttttacatattgatccgattgaatttgagttcggatacggactcgtgccgcttgcagacgcggggcagggcggtgatcttcttgaccgcatcgtcatgatcagacgtcagcttgcgcttgaattgggacttgtcattccggttgtgcgcatcagggataacatcgcactccagccgaatgaatacagattgaaaattaaaggcaatgaagtcgctaaaggagagctcctgctggatcattatttagcgatgtcaccgacgcctgaagatgacgtcattgaaggaattgaaacgattgaaccgtcgttcggacttcccgcaaaatggatcagcgaagctgcaaaagatgaagcggacatgctggggtatacagttgttgatccggcgtcagtcgtatctacgcatattacagaaaaaattaagcagcatgctcatgaactggtcggcagacaggaaacaaagcagctgatcgatcatctgaaggaaaattatcctgtgcttgtcgaggaagtcacgccgaaccctctttctgtcggcgatattcaaaaggtgcttgccaaattgctgagagaaaaagtttcaatcagaaacttggtgaccatttttgaaactcttgccgattacggaagattaacgacagattcagaccttttgacagaatacgcgagacagtcgcttgccaaacaaatcacggcacaatatgcgagagagcatgaaacgctgaaggtcatcacatgctcaggccgggtggaaaaagcgattgcagacggggttcagcagactgaacagggcaattacctgtcactcgaccctgaggtttcggacagcatcatccgttctgtcgctaaagaggccgagcagctttccatccgtcaggagtcggcgattcttctttgctcgcctgctgtcagaatgtatgtaaaacagctgttagaacggtatttccctgatcttccggttctttcttataatgagctggaagcaaatgttgaagtacagagcattggagtggtggatatttaatgaaaataaaaaaatttacagccgcttcaatgcaggatgccgcgaagcaaatcaaaaaggaactcggcaatgatgccgttattttacattccaaacaagtaaagaaacgaaaatggctggggctgcggtcgcagcaggccgtcgaagtgatagcggttttagatcgtgacgtcagggaagcgagaaaaacgccgccggctgccgctgaagaaatgaaaaagacggaaacggcggagaaagctgagcctgttcagccgccgcgccttccggatcaaagtatttccggcgaactggcgcatttgaaagaagtgctccctgaaccattaaaaaaagccgagagactattgaagcaagccgggcttcctgatcatacgcaaaacgctgtactcagtgaattgctcagttcttcaattgtttccggagatttaactgaagataatgtcagctcaaagctgcaggatttgttagtgaaaaaactcccttcgacagacaggtggcaggaagggattcaatcaaaatacgtcgtgcttttcggttcaaccggggccggcaaaacgactacacttgcgaaacttgcggcctcatcaatgctgacagagcataaaaaaattgcctttatgacgacggatacttaccggattgccgcggtcgagcagctgaagacatatgcggagctgcttcaggctcctcttgaagtatgctattcaaaggaagaatgtctgaaggcactggaaaaattcgctgaatacgaccatgttttcattgatacagccggcagaaactttaaagaagagcagtatattacggaattacaagagatgattccgtttgaatcaggcttacaatcctttctcgtattatcggcatctgcaaaatatgaagatatgaaacaggtgctgaaacagttttccggtgtgccggtcaatcaattcattttcacgaaaacggatgaaaccgcctcactcggctccgtgtttcaagtgctgtcggaatcaagaatcggcgccgcctatttgacaaatggacaggatgtgcctgaagacatcctatcggcttcaccaaaagagtttgtaaggatgcttttggcatgaaacccgatcaggcagagtcattaagaaggaaaatgagagagaggcaaatgatcaagccggagctttatgagaaaaaagcgaggacattagccgtcataagcggtaaaggcggcgtcggaaaatctaatttaacattaaacatggcagttgccctgcaggaaaaaggaaaaaaagcactcatcattgatcttgacatcggaatgggcaacattgatgtgctgatcggagctgcttcttcccgcaccattattgatgtgatggagaatcggcacgcgttggctcaatcactttcctccggtccgaaaggccttcgctacatatccggaggaacggggcttgaggcgttctatcaagcagacagagagaagtggtcggcttttatgaatggtctttccgctgtattaagcgattttgattacgttctgtttgatatgggagcgggactttcaaaagaacagctgccgtttattttatcggcggaagacattctcgccgtgacaacgcctgagccgacggccattatggatgcgtacagcgcgatcaaacatcttttgctcgcggatgaacggctgaccgtaaacattgccgtcaatcgcgcccgcgctcaaaaacaggcgctggacacgtacaaccgcctttctcatgcgatccacacgtttttaggcgcggaggtgcgtttcgccggctccatacccgatgatccgctagtaagtcaagccgtcattgaccaggtgccttttttaataaaaagtcctcaagcaaaagccagcaggtccgtccgtcttctgacggatgtcttgtttcaaacggaagaaaacaaaccaagagaagagaaaccggcatttattgagagattatcttcttttttattgaggaggactttacagtgattcgtgtgcttgtcgttgatgactcagcttttatgagaaagatgattaccgattttctggctgcggaagtgcagatagaagtcatcgggacagccagaaacggggaagaggcgctgaagaaaatagagcttctcaaaccggatgttgtcacgcttgatattgaaatgccggtcatgaacggaacggatacattgcggaagatcatcagcatatataaacttcccgtcatcatggtatcgagccagacacagcaagggaaggaccgaacgatcaactgcctggaaatgggcgcttttgattttatcactaagccttccggagcgatttcacttgatctttataaaattaaagagcagctgattgagagggtgattgcagccgggatgtcccgcgcacaaaaacctgaggcggcagtgaaagagtcttctatcccggaacgtccggctttggcgggatttgaaagaccgaaagcaaaatccgccaagcaggccgtattcatcgcgacctctacaggcggaccgcgggctctgcaaaaggtggttccgaaactgccgaaggatttaaaggcgcctgtatttgtcgttcagcacatgcctgaaggcttcaccgcttcacttgcagacagactcaaccatttgtcagatattcaggtcaaagaagcggaaaacggtgaagaagcgaaagacggatgggtgtacatcgcgcccggcggaaaaaatatgacggttgcagaggaaggcggaaggctccgcatcattcttgatgttcatgatacggaaagccggcataaaccgtcagccgattatttgtttcggtcggcaagccgtttatccggttacgaaaaggtagccgtcattatgacaggcatgggcagcgacggaaccgagggcgtaaaagaaatgctcagaacaggcggcgttaaaacgattgcggaatcggacgaatcctgtgttgtgtttggaatgccgaagtcagcgataaaggcgggcctcattcatgagattaaacatgtggaagatatcgcggcatccatcaccggatgtgtgaaaaaagagagggtgtgaatcaattggatatgaatcaatatttagatgtctttattgatgaaagtaaagagcacttacagacatgtaacgaaaagctgctgctgttggaaaaagatccggcagaccttcagcttgtgcatgacatcttcagagctgcccatacgctgaaaggcatgagcgcaacgatgggatatacagatctggcgcatttaacccacctgatggaaaatgtgctggacgccatccgcaacggagaaatgcccgttacatcggattggctggacgtgctgtttgaagcgcttgatcatcttgaagagatggtgcagtccattattgacggaggagacggcaaacgtgatatttctgaagtaagtgcgaagctcgacgtaaatgcggcgcatgagactgcggcttcagccgaaacagcagaaccgccggcttcaaaacaacagacttcaactgaatggaattatgatgagttcgaacggactgttattgaagaggcggaagagcaaggattcagccgctatgaaataacggtttccctgaatgaaagctgcatgctcaaagccgtgcgcgtgtacatgatatttgaaaagctgaatgaagccggggaagttgcaaaaacgatacccgccgcggaagtgcttgagacggaagatttcggaacggattttcaggtgtgtttcttgacaaagcagcctgctgaagaaattaaagaactcatcagcggcatttcagaagtggagaatgtcgaaatttctgccggtgcgccgttaaaaacggccgaaaaaccgcaagcagctgaaccggtgaaggaaactccggttaaaaaggctgaaaaacagccgaaaccgcaagcgaaaacggaagagcagccgaagcatcacagcggctcgaaaacgattcgcgtcaacattgaaagactggattcttcaatgaacctttttgaagaacttgtcattgaccgcggacgtcttgagcagatcgccaaagagcttgaccacaatgagctgactgaaaccgttgaacgcctgaccagaatttcgggcgaccttcagtctattattcttaatatgcggatggtgccggtagaaaccgtctttaaccgtttcccgagaatgatccgccagcttcaaaaggaattaaacaagaaaatcgaattgtccatcatcggagctgaaacggagctggaccgcacggtgattgatgaaatcggcgatccgcttgtccatttaatcagaaacagcatcgatcacggcattgaatcgcctgaagtgcgggtgaataaaggaaaaccggaatcgggtcatgtcgtgcttaaggcatatcacagcggcaatcatgtctttattgaagttgaagatgacggggccggcctgaacagaaagaaaattcttgaaaaagcgctcgagcggagtgtaattaccgaacgtgatgctgaaacgcttgaagataatgagatttacgagcttatttttgctcctggcttctcgactgccgatcaaatttctgacatttcaggtcggggcgtcggtctggatgtcgtaaaaaataaactcgaatcactcggcggctctgtcagtgtcaaatccgcggaaggccaaggttctcttttcagtatccagcttccgctgacactttcaattatatccgttcttctcattaaactggaagaagagacgtttgcgataccgatttcttctattatagagacggctgttattgataagaaagatatcctgcagacgcatgacagagaagtgattgatttcagaggacaaatcgttccgatcgtctatctcaaaaaagaattcggcattacagattcaaaacaggatgccgatcagttccatgtaatcgtcgtgaaaaagggcgataaatccactgcttttgtcgtggactcttttatcggacagcaggaagtcgtactgaaatcactcggcgactatttgacgaacgtctttgcgatttccggcgctacgattctcggaaacggagaagtggcgctgattattgattgcaatgcgctgatctactaaaacgacacgaggaggtgcccgcatgactgctgaaatcaaaacaggtgaaaaaatgattgtgtttatgataaacgggaaagaatacgctatctcagtttcccaggtgaaatcaattgaaaagtggcaaaaaccgacgagggtcccgggtgtggaatcgtatatccgcggcgttatcaatctgcgcggagtaattaccccggttcttgatttaagaaaacgtctgaaccagcctgaacaggacatcacagaagagacacggattatcatcatttcttaccgtgacgccgatgtcggatgggtcgtggatgaggccaatgacgtcatcaccgtgcatgaaaatgaaatcgaatccgcgcctgaaagccagacaaaggaaacggatgtgtggattaaacagatcgtcaagcaagataacaggctcctcaatattattgatgcgcatgcggtgctggataaaggtgcttcggcatctgcgtccggagagccgaatgcttaaaggggaaaagacaacatgagtaagtttgaagcgatcaaagaagagcagatggatattttgcgggaagtcggaaatatcggggcgggtcactcggcttctgccatggctcagctgctgaacagaaagatagacatggaagtgccgtttgcgactttattgacatttgatgagctcgctgattttttcggcggggctgaaacgccggtcgccagtatctttttaagaatggaaggcgacatgacaggctctatctttctcatcatgcctttccatcaggcggaacagtttatcagagagctgatcggaaatccggattttgatattgaccagttgggcgaagatcatttgagttcttctgctttacatgagttcggcaatattttagcaggttcctatttaacggcattggctgatttgacaaagcttgagatttacccgagcgtgccggaaatctcacttgatatgttcggcgcggttatcagtgaaggactgatggagctcagccaagtcggagagcatgccattgtcgtggatacttctatttttgaccagggcagccggcaggagctcaaagcccatatgtttatgctcccggactatgattcttttgaaaagctcttcgtctcattgggtgcggctttatgagccgtgcggaagccgcagtcgttaaagtggggattgcggatgttcaagtcgcgcgttatccggataaaatccggacttcgggactcggttcatgcgtggggctggttttatacgataaagacaaacaaacggcaggactcgttcacgtcatgctgccggactccggtttatcaaaaacggcggagctcaaccgtgcaaaatacgcggacaccgccgttaagatgacaattgatatgcttttgaaagccggctgccgcaagtttgccctgaaggcaaaactcgccgggggagcggagatgtttaagtttaaaatgacaaacgacctgatgaaaatcggtccgaggaatgtagcggctatcaaagagcagctttcattgtataacattccggtcatcagtgaagatacgggcggctcaagcggccggacgattgaatttgagccaaagtcctgcatgctgcacattcgaactgttaaacaaggtgaaacaacgatttaataaaggtatgaggtagggggataacaatgcaatccttgaattatgaagatcaggtgctttggtcgcgctggaaagagtggaaagatcctaaagccggtgatgatttaatgcgccgttacatgcctttggtcacatatcatgtcggcagaatttccgtcggactgccgaaatcggtgcataaagacgatctaatgagccttggtatgcttggtttatatgatgccctagaaaaatttgaccccggccgggatttaaaatttgatacctatgcctcgtttagaattcgcggtgcaatcatcgacgggctgcgtaaagaagattggctgcccagaacttcacgggagaagacaaaaaaagtcgaagcggcaatcgaaaaacttgaacagcgctaccttcggaatgtgacgccttcagagatcgcagaagagcttgggatgacggagcaggacgtagtatcaacgatgaatgaagggttttttgccaatctcttatcaattgatgaaaagcttcacgaccaggatgacggtgagaatattcaagtgatgatcagagatgacaaaaatgtgccgccggaagaaaaaatcatgaaggacgagctgatcgctcagcttgcgggcaaaattcacgagctctctgaaaaagagcagcttgtcgtcagtttattctataaagaagaactgactttgaccgaaatcggacaagtcctgaacctttcgacgtcgcggatttcacagattcattcaaaggcgctgtttaaattaaagcacctgcttgaaaaagtaattcaataatgaactcatggttagcgagtgaaaaacatgtcaacactattatggcttttaagctttgtgcttcacggcgtactgctttatgccgtcattattctgtacacgaggttttcagccctcaaggagacggagcgccagcagaagaagattcttgaagagacggaaaacacccttgcagcgtttctgcttgagctgaaagaagaaaatgaaagactcgaagacacaaaaagccggaatgatcaagcgcctgacgcagaagacgccgaaccccggccggaaccgaaaaaagagcctgatattccggatcacatggaaaagctcatcagtgcaacggaacgggctgaaagtgacgaaaacaacggtgcgcattcgtttgaagaacgtgtttcagaattatatgaacaagggctcacccctgcggaaatcgccaaacgggtgcagagcggaaagacagaaatcgagctgtttttaaaatttcgcggcaaagctgtaaaggattcttgattgtcgcataaagctgtgttatattatgtcttggtgttaaatacacacgcttaacgatttatgcagagggtgctgcaaacggcagttctgcacaaaaatgacctaagcggaggaaaaaaaccattttattaggaggaaatcacatgtcagttatttctatgaaacaattgcttgaagctggtgttcacttcggccaccaaacacgccgctggaacccaaaaatgaagcgttacattttcacggagcgtaacggaatctacatcattgaccttcaaaaaacagtgaaaaaagtagaggaagcttacaacttcacgaaaaaccttgctgctgaaggcggaaaaatccttttcgtcggcacaaaaaaacaagctcaggattctgttaaagaagaagctgtacgctctggcatgtactatgtcaaccaacgctggttgggcggtacactgacaaacttcgaaacaatccaaaaacgcattaagcgtctgaaagacatcgagaaaatgcaagaaaacggtacatttgaagtacttccgaaaaaagaagttgttcaattgaaaaaagaattagagcgtcttgaaaaattcctcggcggaattaaagacatgaaggatcttcctgatgcattattcatcatcgatcctcgcaaagagcgcatcgctgttgcggaagctcgcaaattgaacattcctatcatcggaatcgtagatacaaactgtgatcctgatgaaattgatgtcgtaatccctgcaaacgatgacgcaatccgcgctgtcaaacttcttacttctaaaatggcagatgccattcttgaagcgaagcaaggcgaagaagaagcggaagctgctgaagagactgcacctgaaacagaaacgacaactgcgtaacctaatcaaaaggtgataagagggactgccttttatcaccttttttcaagaaaaatgtatctatacatatcttgtttacacatataaggaggaattcaaatggctattactgcacagcaggtaaaagaactgcgtcaaaaaacaggcgctggtatgatggactgtaaaaaagcattgactgaaactgacggagatatggacaaagcaatcgaccttctgagagaaaaaggaattgcgaaagcggctaaaaaagctgaccgtatcgctgctgaaggttctactcttattaaaactgacggcaacaaaggcgttatcttagaagtaaactctgaaactgatttcgttgcgaaaaacgaaggcttcaaagagcttctgaacacgcttgctgaccaccttcttgcaaacgctcctgctgatcttgaagaagcgttgggtcaaaagatggaaaacggttctactgttgaagaatacatcacaagcaatgttgctaaaatcggagagaaaatcactcttcgccgttttgctgttcttacaaaagaagacagcgaagcgttcggtgcttaccttcacatgggaggccgcatcggcgtattatccgttcttagcggaacaactgacgaagatcttgcaaaagacatcgcgatgcatgttgcagcggtaaatcctcgttatatttcccgcgaccaagtgtctgaagaagaagcaaaccatgagcgtcagatcctgactcagcaagctcttcaagaaggcaaaccggaaaacatcgtagctaaaatggttgaaggccgtctgaacaaattcttcgaagaaatttgcttattagaccaagctttcgttaaaaacccagacgaaaaagtgaaacaagttgtggctgcgaaaaacgcatctgttaaaacttacgtccgctacgaagttggagaaggcattgaaaaacgccaagaaaactttgctgaagaagttatgaaccaagtgaaaaaataatggcggaaagccttggcgaatctttcgcggcttttcaggcagtataggggacactacttgtgttccctatttttaaaactatatttacaaacctttttttctcttgcataataggaaacggcaatgtttacacttggaggttattatggaaaaaccaaaatacaatcgtatcgttttaaagcttagcggagaagcattggcaggagagcagggaaacggcattaatccgactgttatccaatccatcgctaaacaggtaaaagaaatcgctgagcttgacgtcgaagtggccgtagttgtaggcggcggcaacttatggcgcggaaaaacaggcagtgacttaggaatggaccgtgcgacggccgattatatgggcatgcttgctactgtcatgaactcacttgccctgcaggacagcctggaaacgctcggaattcagtccagagtgcagacatcaattgaaatgcgtcaggtcgctgagccttatatcagaagaaaagccatccgccacctggagaaaaaacgcgttgtgatttttgccgcgggaacgggaaacccttatttctctacggacacaaccgcagcgctgcgtgccgctgaaatcgaagcggatgtgattttaatggcgaaaaataatgtcgacggtgtgtataatgccgatccgagaaaagatgagtcagctgttaaatacgaaaaattatcttatctcgatgtgttaaaagacgggctggaagtcatggattctacggcttcttcactatgtatggataatgatattccgctgatcgtcttttctattatggaagaaggaaatattaagcgtgccgtaatcggcgaatcaatcggaacgatcgtaagggggaaataacgttgtcaaacgaagtattaacacaaacaaaagaacgcatggaaaaagcggttgccgcttattcacgtgaattggcgtcagtccgcgcgggacgtgccaacccatctctattggataaagtgacagtagaatactacggtgcccaaacacctttaaaccagctgtcttccatcaatgtgcctgaagcgcgtatgcttgttgtcacaccgtatgacaaaacggcaatcggcgatattgaaaaagcgatcctgaaagctgaccttggcgtaactccgacaagtgacggcacaattattcgcatcgcgatcccggctctgacggaagaaagacgtaaagaacttgtcaaagtcgtgaaaaaatacgcggaagaagcgaaagtagcagtccgtaatgtccgccgtgacagcaacgacgacctcaaaaaacttgagaaaaacggggacattacagaagacgagcttcgtgcttccagtgaagacgttcaaaagctgacagatgaatatgtgtcaaaaattgacagcgtcacgaaagacaaagaaaaagaaatcatggaagtttaatgaaaaactatgtacaatagataatgtgaaaagaccctctcatgtttacagggggtttttttgttaatactgttgattacattgatcatcagcaacgcaacctttttgggtgacggaggaatctcatgctcaacatactcaaaaattggaagaatcagcagaatgcggcttccaacttagaacggtatacaaaagaagacatactgaagggtgaaattcccgcacacattgccattattatggacggaaacggacgctgggcgaagaagcgctcactcccgcggattgccggacatcatgaaggaatgaaagtggtaaaaagggtgacaaagctcgcaaatcagctcggcgttaaagttctgactctttatgcgttttcaacggagaattggaagcgaccgaagatggaagtcgactttttgatgaagcttccggaagagttcctgaatacgtatcttcctgaattgatagaggaaaatgtacaggtgaaaattatcggagatgaatccgcgctcccttctcatacgtacagggcgattgagaaggccgtaaaagatacagaacaaaatgacgggctgattctcaatttcgctttgaactacggcggacgcacggaaatcgtcaatgcggcaaaagcattggccgaacaggtgaaaagcggcacgctgaatatcgaagacattgatgaagcgctcttttccgggcatttaatgacagaatcaatccaggacccggaactgctcatcagaacgagcggagaaatcagactgagcaactttatgctttggcaggtggcttacagtgaatttgtttttacagatgtcctgtggcccgattttaaagaagatcactttctgcaggcagtgggagaatttcagcagcggggccggaggtttggcggaatttagaggatggtggaaatgaaacaaagactgttaacaggtgttctggcagcggcactatttttatttttggttattttcggaggattgccgttcaccgtatttgtttacgtgatgggaagtatagcgctttttgagcttttgcggatgaaaaagctcagatttttttcttttccgggtctgatcagcttcttgttgttatggctgtatatgatgccggacaaatatcattttttcgatgcgaaaatggaagtaacgattttcgccgtattgattctgctcagctatacggtgctcgtgaaaaacacctttacgtttgacgaagtcgggtttatcgttctcgcgacggtatatatcggactgtgttttcattattttattgaaatcagaaacattgaaacaaacgggcttttgtatatcttttatgcctgcgttgtcatatggtcaacggactcaggcgcatatttcgtcggaaagtcgctcgggaagcggaagctgtggcccgaaatcagtcccaacaaaacagtggaagggtttctcggcggtattgtcatcgcccttatttttacggccgtttttcagctgtttgctcaccttccgatttcatatccggttcttttggtcatcacgcttgttctgtctgtgttcggacagatcggggatttggttgaatcagcgcttaagcggcactatgatgtgaaggattcggggaaaatccttcccgggcacggcggcattttagaccgatttgacagctttttgtttgtcatgccgttcttatactttctgcttgcgcttttttcatgagaaaggctaatatgaaaataagaccgatctggacgcatagaatgggagtggcattttgaagaatatttgtcttttaggagcaacaggatcaatcggggagcagacgttagacgtattgcgcatgcatcaagatcagttccgtctcgtctcgatgactttcggtaaaaacgccgagaaagcgatcccgttgatcagaacgtttcagccgaaatatgtagcagtcggcgacatggatacatatcaaaaagtgaaagaagcgtctttttcgcatgaatgtcaaatcggcatcggagaagaaggcctgattgaagcggcagtcatggacgaagtggatatcgtggtcaatgcgctgcttggaagcgtcggtttaatcccgactttgaaagcgattgaacagaaaaaaacaattgcgcttgcaaataaggaaactctcgtcactgccgggcatatagtgaaaggacacgcaaaacgatacggtgttcctcttcttccggttgacagcgaacattccgctatttttcaggcgctgcaaggcgaacagagcaaaaatatcgagcgcctgatcattacggcatccggcggcagtttcagggataaaacgcggcaggagcttgagtctgtaacgattgccgacgcccttaatcacccgaactggtcgatgggtgcaaagattacgattgactcggctacaatgatgaataaagggcttgaagtcattgaagcgcattggctgtttgacattccgtatgaacagattgacgttgtattacataaagagagcatcattcattcgatggttgaatttcacgacagaagcgtcatcgcccagctcggaaatccggacatgagggtgccgattcaatacgcgctgacatatccggaccggctgcctctgcctgaaacaaaaaggcttgaattatgggagatcggaagccttcattttgcgaaagctgactttgaaaggttccgctgcttacaatttgcctttgaatcaggtaaaatagggggaacgatgccgacggttttaaatgcggccaacgaagaagccgttgccgcttttcttgccggacggatttcattcttatcgattgaggacctgattgaaaaagcattggaccgccacagcgtaattcaggatccgagtcttgcggatatccaagaagtggacaaagacacccggggatacgttaattcaatactcacataaggtggtatgttcgtgaatacagttatcgcgtttattattattttcggaacgctcgtttttttccatgagctcgggcatttattgctcgcccaaagagcgggaatcctttgccgtgaatttgcgatcggcttcggccctaaaatcttttcatttaaaaagaatgaaaccgtgtatacgatcagactccttccggtcggagggttcgtccgcatggccggtgaagacccggagatgatcgaagtcaaacccggttataccgtcgggcttctttttaataaagatgacgaagtggaaaaagtcatcattaatcaaaaggaaaaatatcccgacgctttaattatcgaggtggagacggctgatcttgagcacgaaatgaagattaccgggtacgagcaggggaaagaagatgaactggcgggctttactgtcagtcagacctctttttttatcgtagacggagaagaagtgcagattgcgccttacaatcgacaattcgggtctaaacccgtatggaagcggattaaggcgattgctgccggtccgataatgaacttcatcttagcgtatgtcattctcgtcatgctcggattcattcaaggcgtgccttcaaatcagcctgagctcgggaagctgacagacaatggacgcgcagctgctgccggtttaaaagaaggcgactatatccagagcattaacggtgaaaaaatgaggtcatggaccgacatcgtgacagcggtaaaagaaaatcccgggaaaaaaatcgatgtcgccgtcaaacgggacggcaaatcgtttcatatctcggttacacctgaagctgtaaaagatgaaaataaaaaaacaatcggccgcttcggctcttatgcgccgactgaaaaaggagcgcttgcagcgattgcttacggcgcgacatctaccgttgatgtcacaaaagcgatcctgaccaatctgagcaaacttgtgacaggccagtttaagcttgatatgctttcgggtcctgtcggcatttatgatatgacggatcaagttgcaaaaaccggtattatcaacctattccagtttgcggcgtttttaagcatcaacctgggaatcgtcaacctgctgccgataccggcgcttgacggcggacggctgctgtttttattcattgaagcaatccgcggcaagccgataaaccgtgacaaggaagcatttgtcgtatttatcggcgtagctttcttaatgcttcttatgctggttgtcacatggaacgatatccagcgtttattcttataattgactagtaaaaaatcagaggtgcgaagacatgagacaaagtttgacgcttattccgaccctgagagaagtgccggctgatgctgaagcaaaaagccataagcttctgctgagagcgggatttatcagacaaaatacgagcggggtttacagctacatgcccctggcttacagggtcattcaaaacattcagaagatcgtgcgtgaagaaatggaaaaaatcaacgcggtggaaatgctgatgccggcccttcagcaggctgaaacatggcaggaatcaggcagatggtatacgtacgggcctgaattaatgcgtctgaaagaccgccacggccgtgaatttgctttaggcgcgacacatgaagaagtcattacttctctcgtgcgtgatgaggtgaaatcttataagcgtctgccgctcactctttaccagatccagtctaaattcagagatgaaaaacgcccgcgtttcgggttattgcgcggacgcgaattcatcatgaaagatgcgtattctttccatgcttctgaagaaagtctggaggaaacgtaccaaaacatgtacggcgcatacagcagcattttcgcacgctgtgaattaaacgtccgtcccgttattgccgactcaggcgcgatgggcggaaaagacacgcatgaatttatggctctttctgaaataggggaagataccatcgcttattccgatggatcctcttacgcagccaatacggaaatggcgaaagttgtcatgaacagcgagccgtcagatgaaacacccgaggcattggagaaaattgatacgccaaatgtcaaaagcattgaagagctcgcttcgttcttgcagatcgagccgagcgcctgcatcaaatcaatgctgtttaaagcggatgaccgatttgttctcgtgttagtaagaggcgatcatgaggtcaacgacgtgaaagtgaaaaaccttctgaacgcggaagtggttgagcttgcgtctcatgaagaagtagcggagaaacttggcacggagccgggatttgcggggccgatcggcgctgccggcgacattgagatttatgccgaccaagccgtgaaagtaatggtaaacgccgtttgcggcgcgaatgaaaaagaccgtcattaccgaaacgtaaacatcgaacgtgacgcgtctgtaaaagcgtatgccgatcttcgaatcattcaggaaggcgatccgtcacctgacggaaaaggcacgatccgtttcgctgaagggattgaggtcggacaagtctttaaactcggcacgcgttactctgaagcgatgaatgcgacataccttgatgaaaacgggcgtgcgcagccgatgctgatgggatgttacggaatcggcgtgtccagaacgctttctgccatcgctgaacagcatcacgacgaaaaaggcttgatctggccgaagagcgttgctccgtatgatcttcatattttggcgctgaatatgaaaaatgaagcgcaaaaagagcttgctgaacagctttacggaaaattccagacggaaggttatgaggttttatacgatgaccgcgctgaacgcgcaggcgtgaagtttgctgattctgatctgatcggccttccgatccgcatcactgtcggaaaacgtgccgacgaaggcatcgtagaagtgaaaatccgcaaaaccggtgaatctgctgaagtttcagtggatgagctttctgaatttattaagacgaagtaatcaccataacgaatcgtacaaaatcatgttaaaatagagaaaaaagaaggtacctcatcacctgcggaggtaccttcacttatgatgttttaagggagggatactgtctgaatggaacagttatcagtaaacagaagacagtttcagattcttctgcagcagcttaatatgacagatgataccttcatgacatactttgaagacggagagattgataaactgacaatccataaagcagaaaaagcctggcatttccaatttcgctttaaggctcttttgccgtatcaaatatacgattcattcatgatgaggttaacacaatcgtttgctcacatcgcccgtgtcacatcgtctgttcaggtcatcgatcctacagtgacagaggagcttgtacaggattattggacacgctgtattgaagagcttgaaggaacctcgccgccgatggtggctcttttgaatcagcagaagccgaagctcaagggaaacaaactgatcgtgaaaacaaaaacagatacagaagcatcggcgctcaaaaataaatacagcgcactgattcagcacagctatcgccaattcggatttccggaactgcagctggataccgaaattttcgtatctgaccaagaagtccagaaattccgcgagcaaaagcttgctgaagatcaggagcgggcgatgcaggcgcttatcgaaatggagaagaaggaaaaagagggcgatgaggatcaagcgccgtccggcccgcttgtcatcggctatcaaattaaagagaacgaagaaatccggacgcttgacagcatcatggatgaagaaagaagaatcacggtgcaggggtttgtgtttgatgctgaaacacgcgagctgaaaagcggacgcacgctctgcattttcaaaatcacggactatacaaacagtattttagtaaaaatgttcgccagagaaaaagaagacgccgctttgatgaaaacgctgaaaaaaggcatgtgggtgaaggcgcggggaagcattcaaaacgatacattcgtcagagacctcgtcatgattgcaaatgacgtgaatgaaataaaagccaaaacccgtgaagacaccgctcctgaaggcgaaaaacgggttgagcttcatctgcattctccgatgagccaaatggatgctgtaacgggcatcggaaagcttgtcgaacaggcgaaaaaatggggacatgaagcgattgcgttaactgatcatgccgttgtgcagtctttcccggatgcctattccgccgcgaaaaaacacggcattaaaatgatttacggaatggaagccaatatcgtggatgacggtgttccgatcgcatacaatccagctcaccgtcttttggaagaagacacatacgtcgtctttgacgttgaaacgacaggtctgtccgcagtgtatgacaccatcattgagcttgccgcagtcaaaataagaggcggagaaatcatcgataaattcgaagcgttcgccaatccgcaccatccgctgtcagcaacgacgatagagcttaccgggattacggatgacatggtccgcgacgctcccgatgtcgttgacgtcgtccgggattttaaagaatggatcggcgatgacgtgcttgtggctcataacgccagctttgatatgggatttttaaatgtggcgtacaagcgtctactgaaaacggaaaaagcgaaaaatccagtcattgatacgctggaactcgcgcgtttcctgtatcctgagtttaaaaatcaccgcttaaatacgttatgtaagaagtttgatatcgaattaacccagcatcaccgagcggtctttgacgctgaagcaacgggctacctgctgttgaaaatgctcaaagatgccgctgaaaaagacattttttatcatgatcagctgaatgagaatatgggacaatccaatgcttatcaaagatcaaggccttatcacgctacattgcttgccgtaaatgagaccggccttaaaaatctgtttaagctcgtgtctatttctcatattcaatatttctacagagtgccgcgcattccgaggtcgcagcttaataaatacagagaaggtctgttaatcggctctgcctgtgacaggggagaggtctttgaaggcatgatgcaaaaatcacctgaagaggttgaagatatcgcatcattctatgattatcttgaagtgcagccgccggaagtatacagacaccttctgcagcttgagctcgtccgggatgaaaaagcgctgaaagaaatcatcgccaacatcacgaagctcggggaaaaattgaataagccggtcgttgccaccggaaatgttcactatttaaacgatgaggacaaaatttaccggaagatcttaatatcttcccaaggcggcgccaacccgttaaacaggcacgaactgcctaaagtgcacttcagaacgacagatgaaatgctggatgctttctcctttctcggtgcggaaaaagcgaaagaaattgtggttgacaatacgcagaaagtcgcttcgatgatcaatgagatcaaaccgatcaaagacgatctgtacacgccgaaaattgacggagccgatgaagaaatccgtgaaatgagctatcagcgcgccagaagcatttacggtgaagagcttcctgaaattgtggaagcgagaatagaaaaagaattaaaaagcatcatcggtcatggattcgccgttatttatctcatctcccataagcttgtaaaacggtctctggatgacggttatctcgtcggctcccgggggtccgtcggttcatcgcttgtggcgaccttaacggaaattactgaagtgaatccgctcgctccgcactatgtgtgcccgagctgccgatattcggaattctttaatgacggatcagtcggttccggttttgaccttccggataaaagctgcccgtcttgcggcacacctttgaaaaaggacgggcatgatatcccgtttgaaacgttcttaggctttaaaggtgacaaagtacccgatatcgacttgaacttctcaggtgagtatcagccccatgcccataactacacgaaagtgctgttcggtgaagataacgtgtatcgcgcgggaacgatcggcaccgttgcggaaaagacggcttacggatatgtgaaaggctatgcgggtgatcacaacctacacatgcgcggcgcggagatcgaccgtctggtgcagggctgcaccggcgttaagagaacgaccggccagcacccggggggattatcgttgtcccggattacatggatatttacgatttttccccgatacaattcccggcagatgcgacggggtctgaatggaaaacgactcattttgacttccactccattcatgacaacctgctgaagcttgatatattggggcacgatgacccgacagtcatccggatgctccaggatttaagcggaattgatccgaagacgattccgacagatgatccggaagttatgaagattttccaaggtacagaatcgctcggcgtcactgaagagcagatcggctgtaaaacggggacgctcggtattcctgaattcgggacgcgatttgtgcggcagatgcttgaggatacgaagccgacgacgttctccgagcttgtccagatttccgggctttcccacggcacggacgtatggctcggcaacgcgcaggaactgatacacaacaatacgtgtgaactgagcgaagtgatcggctgccgtgatgacattatggtttacttgatttatcagggccttgagccttcactggcctttaaaatcatggaattcgtgcgtaaaggcaaaggcctgacgccggaatgggaagaagaaatgaaaaagaacaatgtgccgaactggtatattgattcatgcaaaaaaatcaaatacatgttcccgaaagcccacgccgccgcatacgtgctgatggcggtgcggattgcctattttaaagtgcatcacgcgcttttatattatgctgcgtattttaccgtccgcgcagatgactttgacattgatacaatgattaaaggctcgaccgccatcagagcggtgatggatgatatcagctctaaagggcttgatgcttcgccgaaggagaaaaacctccttaccgtgttagagcttgcgcttgaaatgtgtgagcgcggctattccttccagaaggtcgatctataccgttcgagcgcttcggaatttatcattgacggcaacagtctcatcccgccgttcaactcaattccgggactcggaaccaacgccgctctcaatattgtgaaagcacgggaagaaggggagttcctttcaaaagaggatcttcaaaaacgaggaaaagtgtcaaaaaccattttagagtatttagaccgtcacggctgtcttgagtcgcttccggaccaaaatcagctgtctctgttttaagctttgtgcacagcctccgagcggagtttgatttgcattaaatatatggttatggtatagttttattggaaatgctaacgattaccgaggcaaagagtggggaaacccgctcttttgtattgaacaggcaattttgcctcgacatgtccatcgttttctcaatgcccctgctcttttgaagcagggtttttatgcagaggaacggctgatatgatatcgacagcacaaggaggaaaaacatgagcaaaaaagtgactgataccgttcaaggaatggctcagcccatactggatgaccttcagcttgaactcgtagacattgaatttgtcaaagagggtcaaaactggttccttcgcgtgtttattgattccgataacggtgttgatattgaggagtgcgccaaagtcagcgaagcgttaagcgaaaagctggatgaggccgatccgatcactcagaactactttcttgaagtatcttctcctggagccgagcgtccattaaagaaaaaagccgacttcgaaaaatcactgggcaaaaatgtgtacatgaaaacgtacgaaccgattgacggtttaaaagtgtttgaaggcaaattggctgaatttgatggacaaactgttacaatagagatgacggtcaaaacaagaaagaaacgggtcaatattccgtatgaaaaaatagctaacgcaagattagctgtaacattttaatgaatgaagtattagtgtttaaggggggagaccgctaacatgagcagtgaactattagatgctctcactattcttgaaaaagaaaaaggcatcagtaaagacattatcatcgaagcaattgaagctgccttaatttccgcgtataagcgaaattttaaccaggcgcaaaacgtacgggtcgatctgaaccgtgagacgggcacgattcgcgtgttcgcaagaaaggatgtcgtagacgaggtatacgattcaagacttgaaatctcgcttgacgacgcccagcacatccatccgaactaccttgtcggagatgtcgttgaaatagaagtaacgccgaaagacttcggccgcattgctgcgcagacggcgaaacaagtggtgacgcagcgtgtccgtgaagctgagcgcggcgtgatttactcagaatttatcgatcgtgaagaagacatcatgacgggaattgtacagcgcttagacagcaagtttatttacgtgtctctcggcaagattgaagcgctgctgcccgtcaatgaacaaatgccgaatgagagctataaaccgcacgatcggattaaagtatttatcacaaaagtcgaaaaaacgacaaaagggccgcagatctatgtatcaagaacgcatcctggtctgttgaagcgtctttttgaaatcgaagtgccggaaatttatgacggaacggtcgaactgaaatccgttgccagagaagcgggcgaccgctctaaaatctccgtccgcactgatgaccctgacgttgatccggtcggttcatgcgtcggtcctaaaggccagcgggtgcaggcgatcgtcaatgaactgaaaggcgaaaaaattgatatcgtcaactggtctgatgatccggttgaatttgttgccaatgcgctcagcccgtctaaagtactggatgtcatcgtcagcgaagaagaaaaagccacgactgtcatcgttcctgattaccagctttctctggcaatcggaaaaagagggcaaaacgcccgcttagccgcgaaactgacaggctggaaaatcgatatcaaaagtgaaacggatgcaagagaccttggcatctatccgagagagcatgaagaagatgacgatttagagccgctctttatggagcctgaaacagccgaatcggatgaataagaggtgactttaggtgaataagcgaaaaaaaattcctctgcgcaaatgcgtggtaacgggggaaatgaagcctaaaaaggaactgatccgaattgtccgttctaaagaaggagagatttcagtcgatccgaccggaaagaagaacgggcggggtgcctatatcacccttgagaaagaatgcatcttagctgcgaaaaagaaaaacacattgcaaaatcaatttcaatcacaaatcgatgaccagattttcgaagaattgctggaactggcggaaaaggtgaaaaaataacatgtctggaatggaatggtttcccttgctgggtctggccaatcgagctcgtaaggtcgtgtcgggcgaggacttggttataaaagaaattagaaatgcgcgtgcaaaacttgttctgctgacagaagatgcatctgcgaatactgcaaaaaaagtatccgataaatgcaattattataaagtgccttataaaaaagtcgaaagccgcgcggatctcggccgctctatcggcaaggaatcacgtgtcgttgtcgccgtcactgaccaaggttttgcgaataagctgatcagcttgctcgattaatatttttgggggtgaacgaatggctaaaatgagagtttacgaatatgcaaaagccatcaatgtttcaagcaaggaaattttgactgcgctgaaaaacatggatatagtagtaaataaccatatggcaatgcttgaagaaaagaccattaagcagcttgatgcgaaatttaaaaaaggcggcgccggcgttacatctcagaagcctgcggaaacgaacaaaaacaagccgcaagggattaatcagcagcctgctgggaatcaaccaaacaaaattcgagacggaaagaagaatgacgtgcagaataatcaatttaacaaaaacaagaagaataacaacaacaacaaaaacaaaaacaaacgcaatcataacaacaaaaatcagtatcagcaaaaaccgctgaagccgaaaaaagagcttcctgagaaaattacgttttccggctctttaacagtcggggccttagccgaagaacttggcaaagaaccgtctgaactcattaaaaaactgatgcttctgggtgtaatggctaccattaaccaggagcttgacaaagacacaatcgaactgatcgcatctgaatacggtgtggaaacagaagaagtgattgtgcttgaagaaactgagcttgaaaaatatgaagaggctgacaaagaagaagatcttcaaatccgtccgcctgtcgtgacgatcatgggccacgttgaccacgggaaaacgaccctccttgacagcatcagaaaaacaaaggttgttgaaggtgaagccggcggaatcacccagcatatcggggcgtaccagatcgaagaaaacggcaaaaaaatcacgttcttagatactccgggacacgcggcgttcacaacaatgcgtgcgcgcggtgcggaagtaactgatattaccattttagtcgtagcggctgatgacggcgttatgccgcaaacagtcgaagccatcaaccatgcgaaagcggctgaggttccgattatcgttgccgtgaataaagtggataaagaaagcgcgaaccctgaccgtgtcatgcaggagctgactgaatacggactcgttcctgaagcatggggaggagaaacgattttcgttcctctgtctgctcttacaggcaagggaattgacgagcttgtcgaaatgattctgcttgtcagtgaagtggaagagctgaaagccaatccgaaccgtcaggcaaaaggaacggttattgaagctgagctcgataaaggaagaggatctgtcgcaacacttctcgttcaaacgggaacattgcatgtcggagatccgatcgttgtcggaaatacattcggccgcgtgcgggccatggtcaatgatctcggccgccgcgtgaaaacagccggaccgtccacacctgtagaaatcacgggcttaaacgacgtaccgcaggctggcgatcaattcctcgtctttaaagatgaaaaaacagcccgttctgtcggtgaagcacgcgcttccaagcaactggaagaacagcgcagcgacaaagcgaagctgagcctcgatgatctgtttgaacaaattaaacaaggcgatgttaaagacatcaatttaatcgtaaaagctgacgttcaaggttcagccgaagcgttaacagccgctcttcaaaaaattgaagtagaaggcgtaaaagtgaaaatcattcacacaggcgtcggtgcgattacggaatcagacatcattctcgcatcagcttcaaatgcaatcgttatcgggtttaatgtgcgcccagacggaaatgctaagagcacggctgaagctgaaaatgtagatatccgtcttcaccgtatcatttacaaagtcatcgaagaaattgaagcggcgatgaaaggaatgcttgatcctgaatacgaagaaaaagtcatcggtcaggttgaagtgcgccaaacattcaaagtgtcgaaaatcggcacgattgccggcggatatgtaacagacggccacattacacgtgacagcggactccgcctgatccgtgacggcgtggtcatcttcgaaggggaagtagacgttctgaaacgcttcaaagatgatgtgaaagaagtttcacaaggatatgaatgtggtataacgattaagaaatacaatgacattcgcgaaggcgacgtccttgaagcgtatgtcatgcaggaaatcgaaagaaagtgatcggatttgcggaatgtgaatgcatcatttatgatgcgggatcattaaaggagaaacgagccgttctgaagcggattataacgagggttcagaataagttcaacgtgtcggccgcagaaatcggctatcaggacacttggcagcggaccagcttcggaatcgctgtcgtctcttcctctcacgttcaggcggaaaaggagatccagcgcgtactcgcgtttattgactcctttcccgagatagaacggacgatcactagaacagagtggttttaacttagaggtgattgaattgagtatgagagcaaaccgtgtcggcgagcagatgaaaaaagagctcggggatattatcagccgaaagctgaaagacccgagaatcggatttctcactgtaacagacgtacgtgtttcaggtgatttgcaaatagcgaaggtgtatatctccgttctcggcggagagaaaaagaaagaagaggcgctgaaagggcttgagaaagcgaaaggatttatccgttccgaaatcggcagccgaatcagactccgcaaaacgcctgagcttgaatttgaatttgatgaatcaattgagtacggcaatcgtattgaaacattgattcacgaactgcattcagataaaccgtctgaataacgggaaagaggatgggcgagtgtcgtctgtcctcttttctgcgttttacgggatacaattgataacaaaggagcgaaagacagatggttaacggagttctccttttacataaaccggtcggcatgacttctcacgactgtgtaatgaaaataagaaaactgttaaaaacaaagaaagtcgggcatacgggaacccttgatccggaagtgtcaggcgtactgccgatctgtgtcggacgggctacaaagatcgttgagtacgtcaccgacaagtcaaaaacgtacgatgctgagatcactctcggtttctccacatcgaccgaagatcagacgggagaaacggtcagcgtaaagcctgtcagggagccgctggaagaagcggatatcaaagccgttttagacgaattgaagggaccgcaggagcaagtgccgccgatgtattccgcggtaaaggtcaacgggaaaaagctctatgaatacgccagagcgggtattgaagtggagcggccgaagcggaatatcacgattgaagatatcgcgctcacttcccctgtcacttataacgaagacacagcatcattccgctttacagtcacgtgctcaaaaggcacttacgtcagaacgttggcggtgacaatcggtgaaaaactcggctatcccgcgcatatgtcgcatctcatccgcactgcttccggcgatttcagccttgatgagtgtttcacgtttgaggaacttgaacagcaggtttcggacggaacggttgcagagcatgccgtgccgatcgatagagcgctcaatcatttgccgaaatgggtcataagtgatacattagctaagaaagctgaaaacgggtcagtgtttgacatcccggcggaattttctgcaatgacagctgacgcccgtatagcggtctgtactgaagacggagaatgtgtggccatttatatgccgcatccttcaaaaaaaggactgctgaaaccggctaaagtgctcatgcaaaaaagcgaacaataagaaaaaaggtgaccgttctgtgaagacgatacatatttctcatccgcatcatttacaaaaagaagagcagccggcgtctgtcatggcgctcggctactttgacggcgttcatttgggacaccggaaagtaatcggaacagccagacaaattgccgaagaaaaaggcctgtcgctggccgttatgacgtttcatccccacccttcccatgtgttgggcagggacaaagagccaaaggatctgattacgccgcttgaagataaaatcagccagatcggacgtttaggcgctgatgtgctgtatgtcgtaaagtttgatgaagcgtttgcgtctctgtctccaaaacagtttgccgaggagtatattttagggttgaacgcgcggcacgctgtgggaggcttcgattttacgtacggaaaatacggaaaaggcacgatggagacgctgccggacgatttaaacggcaaggccggatgcacgactgtcgagaaacagaccgagcaggacagaaagatcagctccacttatatccggtcagcgctccaggatggtgacgttgaacttgcgcacactcttctcggccagccgtattttctccggggcactgtgattcacggagacaagagaggccgcaccatcggttttccgaccgcgaatgtcggcctgcacaacagctatatcgtgccgccgacaggcgtgtatgcagtgaaagccgaaataaaaggcgaggtgtatgaaggcgtctgcaacatcggctacaaaccgaccttttatgaaaagcgtcccgatcagccgtcaattgaagttcatttgtttaattttcaacaggatgtatacggagaagacgttaaaatcgagtggtacaaacgaatccgaagcgaacggaagtttaacggcatcgatgaactgacggctcagatcgggaaagacaaacaagaagcgatccgttttttcagcaaataacggaaaaaacatcaaaagtacacaaattttattctaaaagatttgcatatgggcgcgatttttagtatcatatgtttcgtagtcttaaaaccattgcttggcaatccgaagtcaccgacggttgctaggtaactggggctaattatgatatggaggtgaaacaggatggcaattactcaagagcgtaaaaatcaactcatcagcgagttcaaaacacacgaatctgatactggttctccagaagttcagatcgctatcctaacagactcaattaacaacttgaacgagcatttgcgtactcacaagaaagatcaccactcacgtcgcggtcttcttaaaatggtaggtaaacgtcgtaatcttcttacgtatctgcgtaataaagacgtaactcgttaccgtgagttaattaacaaactaggcttacgtcgataatcgtaaaaagcgggaggattcccgcttttttatcgtattaaagcgaaaaaaataataataaaaaaacaatgaaatccttttacatactactttgacattgatatgttcaattcatttcgttcataataggagtaattgattatttcacacattaagagaggagctcgtaatcgaatgggacaagagaaacatgtctttaccatagattgggccggcagacagcttacagtagaagccggccagcttgccaaacaggcaaacggcgctgtcatggtccgctacggcgatactgcagtgctcagcacagcaaccgcatcaaaagaaccgaaaccgctagattttttcccgcttaccgttaactatgaagaaagattatacgcagtaggtaaaattccgggcggttttattaaaagagaaggccgtccaagtgaaaaggccgttttagccagccgtctgatcgaccgtccgatccgcccgcttttcgcagacggattccgtaacgaagtacaggtcatcagcattgtcatgagtgttgatcaggactgctcatctgaaatggctgcaatgttcggttcatcactcgctctttgcgtttccgatatcccgtttgaaggcccgatcgcgggtgtgacggtaggccgcattgacgggaaattcgtcatcaatccgacggttgaccagcttgaaaaaagtgatatcaacctcatcgttgcaggcacaaaagatgccatcaacatggtggaagccggagcggatgaagttcctgaagaaatcatgcttgaggcgattatgttcggtcacgaagaaatcaagcgcctgatcgcattccaagaagaaatcgtcgcagcagtcggcaaagagaaaacagagatcgaactgtatgaaattgacgaagagctcagcgcaaaagtaaaaagccttgcggagccggatcttctcagcgccattcaggttcacgaaaaacatgctcgcgaagacgcgatcaatgaagtgaaaaatgcagttgtcgcgaaattcgaagaagaagagcatgatgaagatacaattaaaaaagtgaaacagacactgtctaaactcgtgaaaaacgaagtgcgccgtttgatcacagaagaaaaagtccgtccggacggccgcggcgttgatcaaatccgcccgctttcttcagaagtcggtcttctgccgagaacgcacggatccgggctgtttacgagaggacagacgcaggcgctcagcgtttgtacattaggcgcccttggagacgttcagattcttgacggtttaggcgtggaagagtcaaaacgctttatgcatcattataacttcccgcagttcagcgtaggggagacaggcccgatgcgcggaccgggacgccgtgagatcggtcacggtgctcttggagagcgtgcgcttgagccggtcattccgaatgaaaaagacttcccgtatacggtccgcctcgtatctgaagtgcttgaatcaaacggttccacttcacaggccagcatctgcgcaagtacgcttgccatgatggacgcaggtgttccgattaaagcccctgttgcaggtatcgcgatgggacttgtgaaatcaggcgagtactatacagtattgacggatattcaagggatggaagacgccctcggtgacatggactttaaagtagccggcacggaaaaaggcgtgacagcgctgcaaatggacattaaaattgaaggcctttcaagagaaattcttgaagaagcgcttcagcaggcgaaaaaaggaagaatggaaatcttggacagcatgctcagcacgcttggtgaatcaagaaaagaactttctcaatatgcgccgaaaattttaacgatgaccattaatccggataaaatccgtgacgttatcggaccgagcggtaaacaaatcaacaaaatcattgaagataccggtgttaaaattgacattgaacaagacggcaccatctttatttcttctactgatgaaagcagcaaccaaaaagcgaaaaaaatcatcgaagatcttgtcagagaagtcgaagtcggccagctttacctcggtaaagtgaaacggattgagaaatttggcgctttcgttgaaatcttcagcggaaaagacggtctcgttcacatctctgaactagcgctcgaacgggtcggcaaggttgaggatgttgtgaaaatcggtgacgaaatccttgtgaaggtaactgaaattgacaaacagggacgagtgaatctgtcgcgtaaagcagtgctgcgcgaagagaaagaaaaagaacaggaacaacaacaatcttaaatgaaaacctaacaaggagcctgggagacccggcttctttattttgagaaagacaacagacgggttctaccttgtcctcctcatacataatgtgtgatgagggggaaggacatgttgaaaaaattcgtgccgtttgccgtttttttatttcttttttttgtttcgtttgaaatgttaaaaaacccgtatacagttgattacatagacgcaatgaaaaaagacgcggtaactgtgtcatcatcaaaagatccgctctatgaagaattactgcaaaaagcgtcagagtatgaagtgaagccgcaagacgctcggattgataaaatatggaagagtataccgggatataacggtttaaaagtcaatgtggaaaaatcctataaacaaatgaaaaaggacggagaatttcacgaagacgaccttgtctatgagcaggtaaagccgaaagtccatcttgattctctcgcgcccgaacccatttataaaggaaatcccgacaaaccgatggtcgctttcctgataaatgtcgcctggggaaatgaatacgtggagcaaatgctgcctattctgaagcagcaccaggtcaaagcaactttctttcttgaagggaaatggctgaaaaacaatcaggaactggggaaaaaaatagcggcagacggacatgaaatcggaaatcattcatacaatcaccctgatatgagcaaactgacttcaggaagcatttccgaacagctcgacaaaaccaatgcacaaatcagcgagacgctcggcatgaagccgaaatggtttgcgccgccaagcggcagcttcagaaaagccgtggtcgaccttgcggcggaaaaaggaatgggcaccatcatgtggaccgttgacaccattgactggcaaaaaccgtctcccgctgttttacaaacaagggtgctgagcaaaatacataacggagccatgattttaatgcatccgactgatccgactgcgaaaagcctggatacactgattgcaaaaatcaaagaaaaaggctacgcgctcggctcagtgtctgacttaatggatgaaaacaggctgatgaagtagcaggcagctgcctgtctttgaataggaggaacagacttgataaaacgctatacatgccaaaacggtgtaagagttgtgcttgaaaataatccaacggtgcggtctgtggcaatcggcgtatggatcgggacgggatcacgtcatgaaacgccggagacaaacggtatttcgcactttcttgagcatatgttttttaaaggaacaaataccaggtccgcacgtgaaatcgcagaatccttcgatcggataggcggccaagtgaatgccttcacttcaaaagaatatacgtgctattacgccaaagtgctggatgagcatgcaaactacgcacttgatgtgctggctgatatgttctttcattctgcttttgacgaagatgagctcaaaaaagaaaagaacgtcgtatatgaagaaatcaaaatgtatgaagacgcaccggatgacattgtccacgatctgctgagcaaagcgacatacggcaatcattcgctcggatacccgattctcgggacggaggaaacgctttcgtcgtttaacggcgattctctcagacagcatatggatgacttttacacgccggaccgcgtcgtcatttctgtcgccggaaatgtaacggaacaattcattaaagacgtggagaaatggttcggtacatacgaagcgaagggcaaagcaagcggcatcagcgagcctgagtttcattatgaaaagctgacgagaaaaaaagacaccgaacaggcgcatctctgtctcggtttcaaaggcctgaaagtcggagatccggacatttacgatttgatcgtcttaaacaacgtgcttggcggaagcatgagcagccgtcttttccaggatgtgcgcgaagataaaggactggcctattctgtatacagctatcacagttcctatgaagacagcggtatgctgacgatttacggaggcaccggcgcgaatcagctcggacttctgtctgaaaccattcaggaaacgttatcggttctaaaacgtgacggtatcaccccgaaagagctggaaaacagcaaagagcaaatgaaggggagcttaatgctcagcttagaaagcacaaacagcaaaatgagccggaacgggaaaaatgaactcctgctcggaaagcataagaccatggatgaaattatcgctgaattaaatgcggtcagcctggaaagcgtcaacggcctcagccgccgcttatttacggatgattacgcactatcgctcatcagcccgaccggcaatataccggcctcgtcttaagctgcaaagcagtctgcctctgtacggggcaggcatttttttttgctccgggtcatatagtacaaggggtggctatcatgaggctcagtgaactgtcaggtaaagaaattgtggatattaaacgggcagagcggctcggcgtgctcggccagaccgatttggaaattaatgaacaggacggacaaattaccgcgctgttgataccgacggtaaaatggttcggactgcgaaaacaaggccacgacatccgcgtcccctggaaccatatccaaaaaatcgggtcagacatgatcattttagacgttccgggggagatcacgcctcccgaagagtagatcttattcattttttgcaagcaccggctcatacagccggtgctttttttatgaaaaagacgctgtacattcaccgccctttctctttgcacatacgatgaagaggaggatgacacttaaaggatccagtaactgtaaagaaggtgaacgtttcagatgttaaccggattaacaattgcgatcattggcggtgacgcaagacagcttgagattataagaaagctgacagaacagcatgccgatatttatcttgcagggtttgaccaattggatgacggttttacaggaaccgtcaaatgcaaaattgatgagattccctttcaaaaaatagacagtatcatcctgcctgtatcggcaacgaccggagaaggcgttgtttccacggttttttcaaatgaagaagtggtattaaagcagagctatcttgagcggacaccggagcattgcgtcatttattcaggcatctccaacgcgtatcttgaggggatcgccagcgaagccggccgtaagcttgtgaaattatttgagcgggacgacatcgcgatattcaactcgattcccactgttgaaggaacaatcatgatggcgattcagcatacggattataccattcacggatcaaatgtcgccgttcttggcatggggcgcaccggtatgacgatcgcccggacgtttgcagcgttaggggcgaaagtaaaagtgggcgcgcggagttcggctcatttagcccgtatatcggaaatggggctttctccttttcaacttgaagagcttactgatcatgtaaatgatattgatatctgcattaacaccgtaccgagcttgattctgaatcaaagcgttttatcgcgcatgacgcccaagaccttgattttggatttagcatcccgtccgggcggaacggatttcaaatatgctgaaaaacaaggcattaaagcgctgcttgctccgggtcttccgggaattgtggccccgaaaacagccggacagattattgcgaacgtattgagcaagcttttggcagacttaaagaaagaggggaaataaccatgtctctgaaagggaaaagaatcggattcggattaaccggctcgcattgcacatatgaggaagtgtttccgcaaatagaggcgcttatcagtcaaggagctgaagtccggccggtcgtgacatcaaccgttcaatcgaccgatacccgctttggggaggggggagattgggtcagaaaaattgaagaaacaacaggctttgaggcgattgattccatcgtaaaagcggagccactcgggccgaaacttccgctcgactgcatggtcatcgcccctttaaccggaaattcaatgagcaaactcgcaaatgcgatgaccgacagccccgtccttatggctgcgaaagccacgatccgcaacggccgcccggtcgtgctcggaatttcgacaaatgacggactcggtttaaacggaacgaatttaatgaggctgatgtccgcaaaaaacatatatttcatcccgttcggccaggatgaccacgtgaaaaaaccgacatcgctcgtcgccagaatggatctccttccgattacggtagaaaaagctcttttgcaccagcaggttcagccggtgctcgtacaccatcatgaataaaaaatcatgatgacagaaaatcattccggaataaaaaaattcggtcaatccgtgactattctatggtaaaataaaacgtaaaatgcaaagtcaattcaacaaatgatgcttaattggcggaaggagttttacagatgggaagaggattacacgtagcagttgtcggagcgacgggagccgtaggacagcaaatgctgaaaacactggaagacagaaactttgaaatcgaaacactcacactactatcctcaaagcgttctgctggtacgaaagtaacgtttaaaggcgaagaatatacagtgcaggaagctgttcctgaaagcttcgaaggcgttcatatcgcgttattcagcgccggcggaagcgtatcacaaagcttggcgcctgaggctgtaaaacggggagccatcgtgattgacaatacgagcgcattccgtatggacgaaaatacaccgctcgtggtgcctgaggtgaacgaaggtgatctgcacaaacataacggcattatcgccaaccctaactgttcaacgattcagatggtggctgcgcttgaaccgatccgcaaagcgtacggtttgaaaaaagtcattgtatctacttaccaagctgtgtccggagccggcaatgaagcggcgaaagaattgtacagccagacaaaggcgattttaaacaatgaacccgcagaaccgtccattatgccggttaaaggcgacaaaaagcattatcaaatcgcatttaacgccattccgcaaattgataaattccaagacaacggctatacgtttgaggaaatgaaaatgattaatgaaacgaaaaaaatcatgcatatgccgaagctggaagtggctgcgacatgtgtaagactgccgattgaaacagggcattcagaatctgtttacattgagcttgaccgtgatgacgcaaccgttgaagatattaaacagcttttaaaagaagctccgggtgttacgcttcaggatgatccggcggagcagctttacccgatgcctgctgattgcgtcggcaaacgcgatgtatttgtaggaagaattcggaaagatttggacagagcaaacggttttcatttgtgggttgtttctgataacctgttaaaaggcgccgcttggaactcagttcaaatcgcggaaagcctgcaaaaactgaacctcgtataaaacaaacgtattttctataggcgaacagaagagagtaaggctctgcctgctctcttctgttacgtcagactaatttggagtgaaaatagtgaagatcattgttcaaaaattcggcggaacatccgtaaaagatgacaaaggccgcaagcttgcgctagcacacataaaagatgccataagtgaaggttataaggttgtcgttgttgtatcggcgatgggaagaaaaggagacccgtacgcgacagattctttaatcgggctcctttacggcagccagtccgacatttctccgagagagcaggatatgcttctgtcttgcggagaaacgatttcgtccgttgttttttccagcatgctgaaggaaaacggcataaaagccgcagctttaacaggagctcaggccggctttttaaccaatgcccagcatactgacgccaaaattatagaaatgaaaacagagcggcttttcgctgcactcgccagccatgatgccgtcgttgtcgcaggctttcagggagcgactgaaaaaggcgacacgacgacgatcggcagaggtggaagcgatacatcagcggcggcgctcggcgcggcggttgatgctgagtttatcgacatttttacggacgtggaaggtgttatgacagccgatccgagaatcgtggaaaatgctaagccgcttccgaatgtcacatatacggaaatctgcaaccttgcttatcaaggcgcgaaagtcattcatccgcgcgcggtggaaatcgccatgcaggcaaaggtgccgatccgcgtgcgctccacttattcaaaagacaaaggcactttggtgacgtcccatcattcgtctaacatcggcagcgatgtattcgaacggctgattacggggatcgcccatgtgaaagacgtgacgcaatttaaggttcccgccaaaatggggcaatacaacgttcagactgaagtctttaaagcaatggcaaatgccggaatcagtgtagatttctttaacattacgccgagtgaaatcgtatataccgtagccggcagtaaaacggaagccgcgcgcagcattttggctgaattaggatatgagccgacagtgacggaaagctgtgcgaaagtgtcagcggtcggcgccggaataatgggtgttccgggtgtcacgtcaaaaatcgtctccgcactttctgataaaggcattccgattctgcaatctgccgacagccatacgacgatctgggtgctcgttcatgaaaaagatatggtaacggccgtaaatgcgctgcatgaagtgtttgaactttcaaagtaaatgtgattgaatcatgatgaggtgaaaaaaatgaatgtcggaaatatatctacagcgatgattaccccctttgacagtaaagggaatgtagactttcaaaaactgtctacattaatcgactatttgttgaaaaacggcacggattctttagtcgtcgcaggcacgaccggcgaatccccgacactttcaacggaagaaaaaattgcactctttgaatttacagtcaaagaagtgaacggacgcgtgcctgttattgcgggtacgggaagcaacaatacgaaagattccattaaactgacaaaaaaagctgaagaagccggcgtcgattgcgttatgcttgtcacgccgtattataataagccttcccaagaggggatgtaccgtcattttaaagccatagctgaagaaacgtctcttcctgtgatgctttacaacgtgccgggcagaacggtcgcttcgcttgcgccggaaacggccatcagacttgcggagattccgaatatctctgcgattaaagaagcgagcggcgatcttgatgccattacgaaaatcattgccgaaacgccggaagatttttacgtctattcaggtgatgacgggttaacgcttcctattcttgcagtcggcggaagaggagtcgtgtcagtggccagccatattgtgggttctgacatgcagcagatgattaaaaactatacgaacgggcagacggcaaccgcggcactgattcatcagaagcttctgccgatcatgaaggagctctttaaagcgcctaatccggctccggtcaaaacggcgctgcagctgaaaggccttgatgtcggatctgtgcgtcttcctcttatcccgctgaatgaagatgaacgtctgagcctgagcagcgtcatcagcgaactgtaagaaaaaatttatacagttgaaatacgcggtcattctcatttttatcgtgagtttgaccgttttgtatacatattggttttccctaaaccttccgcttcttcttgttttctaaaattgatatcagttataataggaacaagtgatgatggacgggtatgagactaggaggatacagattttgaaaaagaaaaatacagaaaacgtcagaattatcgcccttggcggcgtcggagaaattgggaagaacctatatgtcattgaaattgactcagacatatttgtagtggatgcggggctgatgcaccctgaaaatgaaatgctcggtattgatgtcgtcattccggatatttcctacttagtagaacgggctgaccgcgtgaaggccatctttctgacacacgggcacgatgaaaacatcgggggcgtcttttatttattgaacaagctgtcggtgccggtatacggaacgaagcttacgcttgcattactgagagaaaaactcaagcagtacgggcataatcgaaaagctgatttacgtgaagttcactctaaatcagtcattacatttgaatcaacgaaagtatcgttctttaaaacgattcacagtattccggattcagtgggagtcagcttcaaaacatcacttggctctattgtatgcacgggagacttcaaatttgaccagacgcctgcttatcatcaatcatgtgatattggcgaaattgccaaaatcggaaacagcggcgtgctcgccctgctttctgacagcgccaatgcggagcgcccggggtatactccgtcagaagcatatgtaagcggtgaaatttccgatgcgatgaacaattcagaaaaccgtgtcatcattgctgtattcgcgtctaatatcaaccggattcagcaagtgatacaggctgccgtccagaacggccgcaaacttgcaatcgccggaaaaaatctgcaaaacgtgcttcagcttggacgcaagctcggctatattgaagccgaagatgaaatgtttattcctgtgcaggatgtgaaaaaatatccgaagcgggacgtggcaattgttacagccggaagccatggtgagccgctggccgctcttacgcgaatggccaagcaggcgcacaagcagcttaacattgaagaaggagacaccgttgtcattgcatcaacaccgattccggggcatgaattgatatattccaaaaccgtcaacctgcttgcccgcgccggcgctcaagtcattttcgcccaaaaacgagtgcatgtgtccggtcacggttcgcaggaagaattgaaactcatgcttaatttgctgaaaccgaaatatttaattccggttaacggtgaattcagaatgcaaaaagcgcattccaaaatcgcagaagagatcggcatgaaacgcagcgacattttcttgattgaaaaaggtgatgtcgttgaattccgcggccagaatgtgaaaatcggggataaagtcacatacggaaacgttctgattgacggcctcggagtcggcgacatcggcaacatcgtgctgagagaccgccgcttattgtcacaagacggcattctcatcgtcgtgatttcactcgataagcagaagaagaaccttgtttcaggccctgagatcattacgcgcggtttcgtgtatgtcagagaatcagaggggttaattgtacaagctactgagctcgtccgctctatcgtgactgaagcgacggaaacatctgccgtagaatggtccacgctgaaacaagcaatgcgtgatgcgctgaatcaattcctttatgaaaaaacaaaacgcaagccgatgatcattccgatcattatggaagtataatgtatacaaagccggagcgcatgatgctccggctttgtttttgttcatgtcccggatggaaatcatcatctttgttcataatacaaagagacattcggaaagggtgaaagataaaatggatcatcgtatggaaaacaccgaagaacagcagcccgaaaaatcagatgcgaaagacagcattatgagcaaaattcagcagctgggagagacatctctgccgcaaatgtcccaagataccaatattcactgcctgacgatcatcggccaaattgaggggcacgtccagctcccgccgcaaaataaaacaaccaaatatgaacatgtcattccgcaaatcgtcgccattgagcaaaatccgaaaatcgaaggacttctgatcatcttaaacaccgtcggaggcgatgtggaagcggggcttgcgattgcggaaatgctcgcatccttatcaaaaccgaccgtctcaatcgtactcggcgggggccactccataggtgtgccgatcgccgtgtcatgtgatcatagttttatcgcggagacagcgacaatgaccattcaccccgttcggcttacaggtctggttatcggcgttccgcaaacgtttgaatacctggataaaatgcaggagcgggtcgtcaactttgtgacccatcattcaaatatttccgaagaaaaattcaaagagctgatgttttcaaaaggaaacttaaccagggacatcggaacgaacgtagtcggcaaagatgcggctgattacggattaattgatgccgtgggcggcgtcggacaggcgataaaaaagctgaatcagctgattgaggaacgaaagggcgaggaaggaaggatgattcaatgatcctttataccgtcatgccacaagaagtcgtttacggtcaggatatagagcaaagcgtgcatgaacaggtagattacgccggcgtgccgctgctggttgagatgaagggaaatgaagctgaagtcgtacagattttaagtacgaacccgatggattttctgaatccggacatcgctccgggacaaaaaatcaagctgaaaatctaaccggcattcagtccgtttctcgggggcaaaatatgctataataggggaatcctacagaaaaatgcagccggcaaaaggctgcttttcttcatgatgtatgattttacattttttaacgcagtaaggtgatgagtgtggcaaagaaaaaacggaaatctaaaaagaaacaagagagtaagctcaatctaaaatacgaactaagcggactgctctgtgttgcaatctcgattattgctgttttgcagctcggcgttgtgggacagacatttgtgtacttgttccgtttttttgccggagagtggtttattttatgcttaattgcgctcttccttctcggaatttcgctgttttggaaaaagaagagtccaagccttttaacgaggagaaaggcagggttgtactgtattatcgccagtattttgctgctgtctcacgtgcagctctttaaaaatctgtctcatcacgggtcgattcggtcggcaagtgtcatcggcaacacgtgggagctgtttatgattgacatgaaacagcaggctgcttcccctgatttgggcggcggcatgatcggcgcggtgctgtttgcagcttcccactttttatttgcatcaacgggttcacagatcatggcgatcgtgctgatcttaatggggctgattcttgtaacggggcgttcactgcaggaaacgctcaaaaagtggacgagccccgtcggccggtttatccgcggtcaatggcaggcatttcttgaggatatgaaaacggtcagaacgaatatgtcttcgccgaaaacaaaaaccaaatcgggcaaaaaacaaaaacgggttcagaagaaaaaagaaatgcctgagcccgaagaagaggatgaggaaatcatttcgccgatcatccattcagagccgattatttcaagcttttcagaccgtcaggaagaacgcgtcgaaccgctgattccggaaaaaacgcaggagacggcgcaaacggcaaaagatgagccttccggcggcgctcaagacagtgacgaaacggctgcggctccgccgatgacgtttacagagcttgaaaataaagattatcaaatgccttcattggacatcctggctgacccgaaacataccggccagcagaccgataagaaaaacatttacgagaatgcaagaaaactcgaacggacctttcaaagcttcggggtaaaggcgaaagtgacccaagttcatctcggcccggcggtcacaaaatatgaggtgtatccggacgtcggggtcaaagtcagtaaaatcgtgaatctgagcgatgacctcgcgctcgcgcttgccgccaaggatatccggatagaagcgccgattccgggcaaatcagcaatcggcatcgaggtgcccaatgctgaagttgcgatggtttcgttaaaagaagtgcttgaatccaagctcaatgacaagccggacgcgaagcttctgatcggcttgggacgaaatatttccggggaagccgtgcttgccgaactgaacaaaatgccccacctgctcgtagcgggggcaacgggaagcggaaaaagcgtctgtgtcaacggtattattacgagcattctgatgagggccaaaccgcatgaagtgaagatgatgatgattgacccgaaaatggttgagctgaatgtgtataacggcattcctcatctgcttgcgccggtcgtgacagatccgaaaaaggcctcgcaggctttgaaaaaggtcgtcaatgagatggagcgccgctatgagctgttctcccatacgggtacgagaaatatagaaggctataacgaccatattaagcggtcaaatgccgaagaagaagtcaagcagcctgagctgccgtacatcgtcgtcattgttgacgagcttgccgatctgatgatggtcgcttcttccgacgtggaagattcaattacgagactttcacagatggcgcgggcggcgggaattcatttgattatcgcgacacagcggccttcagtcgatgtcattaccggtgttattaaagccaacattccgtcaagaattgccttcagcgtctcatctcagaccgattcacggaccattttagacatgggcggcgctgaaaagcttctggggcgcggagacatgctgtttctgcctgtaggcgcgaataagcctgtccgggtccagggagcatttttatcggatgaagaggttgagcatgtcgtcgatcatgtgattacgcagcaaaaagcgcagtatcaagaagagatgattccggaagaagtgtcggaaacacacagtgaagtaacggatgatctctatgacgaagcggtcgatttgattatcggcatgcagacggcatcagtctccatgcttcaaaggcggttcagaatcggatatacgagagctgcccgtctgattgacgcaatggaggaacggggcgtcgtcgggccgtatgaaggaagcaaaccgagggaagtactattatctaaggaacaatatgatgagctctcttcttaaaaaggagagagttttcactgaaaatgatatcaccaaaatcattcctatttatttttttattaaaacatgatatagttgtcccaattgttcaataatttatgaaagtggtttacggaggggaaacatgtctacaaaagctgacaatcgtcacttgtacctaaaagtgattgagcgaatcaaagaggatatacaaaacggaatttacaccgaaaaggaaaagcttccttctgaatttgagctttcaaaatctatgggtgtcagccgggcaactctgcgtgaagctttgcgtatccttgaagaggagcatgtgattatcagaaggcacggtgtgggcactttcgtccatacaaaaccgctgtttctttcaggtattgaacagctcaacagcgtgacgaaaatgattcagcaggcgaacatggtgccgggtacgatttttttgtcgtctcaggtcatcacgccgtctgaggaagatatcgctagattccggcttgagcctgagcaggagcttttttatttggaacgcgtgagaacggcaagcggcactccggtcgtttactgtttagatacgattccgatgcacattctgccgaattctttctgtcatgaacaggaatctatttttgatcttttggaaaaaaactccgggtctgtgatcagctatgccgttgccgatatcgaaccgatcggatatcacgatacgatttcaccggttttggagtgcgagccggagacggcgcttttattgctgaagcaaacccactataatcagaatgatgaacctgtgctgtattcattaaattatttccgggctgataagttcagttttcatgttgtaagaaaacgtttttaagacagacgcgtcatgtgtctgtttttttatttgccgcttcaatacatactttgttttccgcaaggcacaataaaacaggaaacaaccaagtatagtgaatgggtgaataagttgagtaagaagaaaaatggaacaaaaaatatcattgctctggcttctgtaccgctcgtgatgacactcgggaattccatgctgattcctgtgcttccgatgattgaaaagaagctgtccatatcgtcttttcaagtatcgttaattataacggtctattcgattgtggcgattatttgtattccgattgccggatatttgtccgataaattcggaagaaaaaaggttcttctgccttgtcttctcatagccggtgcgggcggagcgcttgccgcgatagcttccaccgcgttcaagcatccttatcccattatcttggcggggcgggtgctgcagggaatcggttcggcaggggcggctcctgtagtgatgccgtttatcggtgatttattcaaaggggatgatgagcggattaccgcggggctcggcgacattgagacgtcaaacacggccgggaaagtattaagcccgattctcgggtcgctcttggctgcatggttttggtttatgccgttttggttcattccgtttttttcgcttatcagtttttttctcgtattgtttttggtggcaaagccggagaaacaaaaagaagccccttctatttccgaatttgtaaaaaatgtcggccgcatatttaagcgtgacggacgctggctctttacggtatttatcatcggctgcgtgattatgtttttgctgttcggggttcttttttatttatcagactcactggagaagaaatacggaattgacggtgtggctaaaggagcgcttttggcaatcccgcttttatttctatccgtcagttcatatatatcaggcagaaaaatcgggaaagaccaaggcaaaatgaagttctgcatcgttttcggaatgagtgccgtgacactgtcgtttatcggcctatggtggaatcacagtttttatttattatttatctttttgtgtgtcagcggtatcggtatcggaatagcattaccggcattagacgctgtcatcacagaaggcgtagacaacgaggaatcgggaaccatcacctcattttataacagcatgcggtttatcggagtagctgcgggaccgccgatctttgctgccctgatgtcaaatgcaggctggctgatttttattttatccgctttttgcggcattgtgtctgtatttttagcgctgttaaatatctcatcacaagcaaaagaaaaaaaggaatcattaaagacggtgtaatctgcactgtctttttttattttattttgaagattgacatgatatcgtcaagtcgttatcctttttaatagttaaacattttaactattggaaggagggggaaaagatgcatgaagaaaaagtaaagcagctgattcagcgttattccgatgtatacctgcacgtcttaaaaaaaattgacagcattatcgctgaaaaagtgaacaaagagctgacattggatcaatattacatactccgctatattatgctcaatccggattgcaaatcaattgaactggccgcggtgtgccacgtcaacaaaagcgccattacatcgatgacgaaccgcctgtatgaaaaaggctacatcaatagagaacgcagccaaagcgaccgccggagcatacttttaaatgtcacggaaaaggggacggaagtatttcaccgtgtggagcggcggattgaggaactcgtccgttcatatattatgtattttgatgaagacgaggcggagatgttcgttaatacatatgaaaaattatatcgattgatgatgacagaggaggatcagcagacataatgaaaaacattatccgagcccgctggatcatcgccgcggtatggatcgccgcaacggtgatatttatgcttacagcgcctgatatggctgaattgacacgggagaaagggcagatttccgtaccggacggatattcctcttcttatgcccatgaattgcttgatgaaatgtctgattcagatgcaccgtcttcttctgccgtcatcgtatttcacgaaaaaggcttaatgacagacaaaaaagatcgtctggaagaagccgtcagcactttgtctgaacagaaaaaagcgcttcagattaaaacggtgacttcatacttcggggagaaaaatgacgacatcaaaaaacagctgctgtcaaaagacagacaaacgatgctcgttcagctgcagcttgatacatccaaaaacgatatcctcgaaatcaaaaataaaattgataaagagctgaaaccgtacggcgtatcatacggcattacaggccagtcgctgatcgatgaagatgtgttaaaaagctcacaggacggattgaaaaagactgaatatataacggtcgcttttatcctgatcgtgctgatccttgtattccggtcagtggtcgctccgtttgtgccgcttttatctgtattgatatcttatttagtcagccagtcgattgtcgcatttttagtcgaccagctgaattttccgctctcaacttttacgcagattttcatggttgcgattatgttcggaatcggcacagactactgcattctgcttctcagcagatttaaagaagaactgtcgcatggcgctgatataagagaggcgatcgtcgtcacctacaaaacggccggaaagacggttttgtacagcggcggtgcggtgctgatcggatttgcctgcatcgggtttgcgacatttaagctgtatcagtcggcagccgccgttgcagtcggtgtcgcggtgctgctgcttgcgctcatgacgatcgtgccgttttttatggctgttttaggaaaaagactgttttggcccgttaagggtgatatttcccatcctcaaagtaaagcatgggaaacggcagggcggttttcatttaaaaggccgctcatcagtcttgcaatcgttgcggtattcaccgtcccgccgatccttctttacaaaggatcgctatcttacaacagccttgacgaaatcggggataaatatgaatccgtccgcgcgtttaatacgatttcagacgcattcggcccgggggagcttcttccggccacagtcgtcatcaaaaatgatgagcctctaaataccgaaaaacacctgattgatatcgaaaaaatcagcagagaacttgaaaaaacagagggtgtaaaaacggtcagaagcgccacgcgccctgccggaaacggattgaatcaattatttgtcacaaatcaggcaaagcagcttcaagaagggcttgataaaggcaatacaggacttgaaaaaatcacggacggattagggcatgccgcaaagtcgttagctgattcacagccgcagatcgaagagtcggggaaaagcgtcaatcagcttattaacggaacattgtctctgaaatccgggctttctgatataggcgaaaacctgaataaactgcaggcaggcgtgaatgagaataaagccggcgtcgcccagatgagaaagcagattgaagagcaaaaacaaatgctgacttcacagctcaaacaaaacagcggtctcgcttcagaaacgcaaaacgctttaaaattggtaaaaaccgtcctgccgatgaaagatgaaaccagcagacagcttgccgatttgaacaagcagcttgcccggctgccgtttgcaaaattggaagcgtcaataccgtcagtcaaaaccgatccctcttacaaagaaatcaaatcggcctttacgggtgtacagtcagccgtttccaaggcaaacgcggatgcagaagcgttttctaaacaggtcgacagtcaaaaggatcatctgcagcaagcggaaaaacaatttgcccggctggcagccgctcaaaaaaagatcgacactcaaattaacgcaatgatcaccggtctgaccagtattgaaaacggtctgcagcaagtgtcagacggacagggggctcttgcaggacaaatgccgcgccttgaatcggcggcaggacagctcgcggagggccagaaaaaaatgaagagcggtctcggtgatttttcttcccggctcagcgatctttcttcaggccttaacgatagtgtaaaagggcttaagaaagtatcaagcggcatgatgggggcgaatgattacctgggtgagcttcacaaggcctcagataaagaaatgacaggctggtttgtgccgaaagacgcgttgacaaacagtgatttcacaagcgtgtttaatacgtacatgtcagatgacagaaaaacgacagaattgaccgtcgttcttgataacaatccttactcaaatacggccattcaagatattcaagcgatcaaagcgagcgtaaaaagagccattccgaacacggatctgaagaatgcctctttcggcgtttcgggagtctccagcatgaatgccgatctgaaagaagtatcggattcagacttcaaacggacggcaatgtttatgctggcgggaatttttctgattctcatcataatgctgcgctctcttattatgcctgtttatttagtggcgtcgctcgtactgacgtatttcgcatccatcggcgtgacggaatacatctttacacacttcttcgggtatccgggcgtaaactgggccgtgccgttcttcggctttgtcattttgatggctcttggtgtggattattccatctttttaatggaccgctttaatgagctgaaaaaagaaggaacggaacccgcaatgatcagcagtatgaaaaatatgggttccgtcatcatttctgcggcgattattttagcgggaacctttgcggccatgctgccgtcaggcgttctttccttattacagattgcaaccgtggtattaacaggccttctcatgtacgcaattgtcgtccttccgttttttgtgccggtcatggtgaaaatattcggaagagccaactggtggcctttcaatttgaaaaaataacgttcaatgcctctgcctgttttcgggcagaggttttttgtttccttataaatcctccagttgatataattacatctgcgcactcttttttgcgaatcctgaaatttggccataatacatactattaaagaatgaacgaaggaggtttcacatgacttacgtaaatgaaatgaagtcaaagcacggcgggatcaccgcccacatcgtaaagactgagaaatttaaaaccgtttcgctgacgtttaaaatgctggctcctttaacgaaagagctcgtaacaaaaagggcgctgtttccgcatgtgcttctgcgcggaacagaaagccgcccgaaaaccgctgatctgcgttcttattttgatgagctgtacggcacatccgtttcagctgatctgacaaaaaagggagaacgtcatgtcattacgttcagacttgagattcctaacgaaaagtatctgaaggaccgcacaccgttattggaaaaaggccttcagcttttatcagagcttgtcttttcgcccgctttggaaaacggcgccttcctgcccctttatgtcacgcaggaaaaacggacgctgaaacagcggattcaagccgtatatgatgataagatgagatattctaatctgcgtctcgttcaggaaatgtgcaaaagcgaaccgtatgcccttcacgtcaacggcgagttcgatgatgtcgaacacattacaccgcaagagttgtatgaagcctatcaaaaagccatacgcgaagatcagctggacctgtacgtcatcggcgatgttgattcagatcaggtgaaaacggccgttgatacgtattttaaaacggaagaacgggagctgcagccttttgaaagaagcaagacgaatgaacagcccgatccgaaggaagtcattgatgaagaggacgtcaagcagggcaagctgaatatcggattccggaccaatacgacatatacagatccggattatccggcattgcaggtgtttaacgggctgttcgggggtttctctcattcaaagctgtttataaatgtccgtgaaaaagcaagcctcgcctattatgcagcctcaagggtggaaagcttcaaagggcttttgatggtcatgtcgggcattgaggtgaaaaattataagcaggccgtcaccattatcgaagaacaatttcaggctatgcaaaacggtgacttttcagaggacgatatcgcccaaacgaaagccgttattaaaaaccaagtgttagaaacgattgatacggcatacggcttagcggaatttctgtatcagcaggcttcagcccaagtggaaataccgatcgaaactttcctcgacaatatcgagaaagtgacaaaagaggacattatcaatgtcggaaagaacattaagctggatacgacttatttcttaaaagggacggggggagcatcttgactaaaccgataaatttcgaacagcttcaggaaacgctgtatcatgaaaaaatggcaaacggccttgatgtctatgtgctgccgaaacagggttttaataaaacatacgccgtgtttacgacaaagtacggttccattgacaatcaattcgttcctttaaataaggaagaaatggtacacgtgcctgacggaatcgcgcattttctggaacataaactgtttgaaaaagcggacggcgacgtgtttcaggacttcagtaagcagggggcgtcggcaaatgcctttacatcatttacacgaaccgcttatctgttctccagcacttctaatgtagagaaaaacctggaaacactcgttgattttgttcaggacccgtatttcacggaaaaatcagttgaaaaagaaaaaggcatcatcggccaggaaatcaatatgtatgatgataatccggattggcggctgtttttcggccttatcgaaaatatgtataaagaccaccccgtaaaaattgacattgccggaacggtggagagcatctctcatattacgaaagatctgctgtatgagtgctacgaaacgttttatcatccgagcaatatgctgctctttatcgtcggccccgcagatcctgaagcgatcatcagccaggtgcggaaaaaccaggagaaaaagccgtttacagaccagcctgaaatcaaacgtaaagaggttcaggagcaggaagcggttttccgccgggagcaggaattaaaaatgaacgtgcaaggctcaaaatgtcttgtcggtttaaaggcgaaagacccttataaaacggggcgggagctgttgaagcacgagctcagcatgaacctcatgcttgaatgtctcttcggaaaaagctcaccgcattacggcaacttgtacgataaaggctacattgatgaaaccttcagctttgattacacggctgaatacggattcggctttgcctctgtcggaggagatacaccagagccggataagctcgctgacgaattaaaacagatgctgcttgatgcagaatcagccgtaactgcggaaaaacttgaccttgcgagaaaaaagaagatcgggtcatttttaaaagcgctcaattcgcctgaatacatcgccaaccaattcacacgctacgcctttttagatatgagtctgtttgatgtcgtaaccgtactggagcagatcaccctggaagacgtaaagcgggtcattaaagaagaaatatcagaagacaggctgacagtctgcaaagtcgtgccaaaatcataacaaaacatccctcacgccctgagggatgtttttctggggaaagaaggagtattgattgatgaaacagacagcgctcgtaaccggagcaagcggcggaatcggacaaagtataagtgaagtcctcgcaaaaaacggatatgacgtccttttgcattatcattctaataaggaagccgcacacaggcttgcggaaaggctgagcgcatcattcggcgtaaaagcctccgctatccaggctgatctgtcctcaccggatggcgcggagacactcagccgttccgttaagcagcctgtggacgctctgatattaaacagcggcaaaagtcatttcggcctgattacggacgttacggatgacacggcgcgggagatggtgcagctgcatgtgacgagtccgtttcttttggcgcgtaatctggtgcccggcatgatccggaaaaaaagcgggggcattgtcgcgatcggttccgtctggggagaaacaggtgcatcgtgcgaggtattatacagcatggtcaaaggagcgcagcattcgttcgtcaaagcgcttgccaaagagctcgctccgagcggcgtccgcgtgaatgcggtctcgccgggtgccgttgatacaaatatgcttgatcagttcacgtctgatgaaaaagaagcgttggcagaggaaattcccgcgggccggctggcgaagccggaggaaatcgccgaagcggcggcctttttattatcggacaaggcttcctatattacggggcatatattatccgtaaacggcggctggcactgctgaaaaaaatgtgtgtatagtttgcatctgcacggacaaaataattttgtaacaacagatgaaatggaggaacccaacatgtcagtattagaaaactgggataattggaagaatttccttggcgacagattgaactatgcgcaggaaaaagggatgagtgatgaaacgatcactgacctcgcgacagaaatcggcggttaccttgcgaacgaagtcgactcgaaaaaccatcaggaaaaagtgcttgctgatctttggagcgttgcttctgaagatgaacagcgcgccatcgcaaatatgatggtgaagcttgttgaaaataacagcactcattaagaggggggatttctcctctctttttttatgttttcctctatagagcaacattcttctttctaattagagaaaaatgttttatgataaaggaaggtaaaaatttgccacaatggagggggtatatcatttggcaaagctcgaatggtattttgaatatgaaattcaagtgaaccgccccggcctgctcggggatatttcatctcttctcgggatgctgtcaattaatattgtcacaattaacggtgtcgacctttccagaaggggaatgctgctcagatgccggcatatagatcaaattaaacgattggaatcaattttaaaaacaatggagaccattaaagtaacgaagttgagagaaccgaggcttcgcgaccgtctcgcagtccgccacggaagatacattcagcgtgatgccgatgacaaaaaaaccttccgttttgaaagggacgagctcggtcttctggttgactttatggccgagctgtttaaaaaagaagggcacaaactgatcggaatccggggaatgccgagggtcggaaagacggagtccatcgttgcgtcaagcgtttgtgccagcaaaagatggcttttcgtatcatcaacgctgctaaaacaaacgatccggagccagctggttgccgatgaatacagcacggaaaacgtgtttatcctcgacggcatcgtttcgacaagacggggatctgagcgccatcttcagctcgtcagtgaaattatgcggcttccggcgacaaaggtcgtggagcaccccgatatttttgttcaaaattcggagtatacgctcgatgatttcgattatattatcgaactcagaaatgatcctgacgaagtcattacatatgaacatgcagaagaaccgcaaatgtttgaccagaccggtttttcaagctttgatttttaatattggaaggtgtttgttgtgacagaattagcaatccggcttaaagaagccagagaggaaaaagggatgtcattggatgaactccaggcggcgacgaaaattcagaaaagatacttaaccgctctggaagaaggcaattatgacgtcattcccggcaatttttatgtgcgggcgtttatcaagcagtacgctgaagctgtcgggcttgattcagatcagttattcgaagaatataaaaaagacatccctaacacgtaccatgacgatgtgtcggaaaaaatctccggtctcgccatgcaaagggagcttcctaagtccgcttcaaaggcggcggaatggcttccgaccgtccttgtcgtcatcggtgtcattatcgtcatcgcgatcatttatgcgattattcagttcggaatgagcaaatccgggcagacagacggagataaggccgtcacccaaagtgagagcaagtatgagattcctaaggattctgcgctgaaaaacgacggcaatacaaacgacgaagcgcaatctgacagcaaaaaagacacaaaagcgtcagagcagaaaaagaaagaaaaaagcagtgaaaagacggagatcaaagcggccggaacggaaggctcggcttcttcatacaacgtctccggggcagataagtataagcttgaactgattgcttctgacagcgcatggatccgcgtccgtgatgacagcggcggttctttaaaagaaggaacgctgcaaaaaggcgaaacctttaaaaaagacgtcacggatcaaaagcagattgaaatccgcacgggctatgcccctaacctgaaaattaaaatcaacggagaggttctgtcctatgaactcaatccgcatgatatgatggcgcagaccatcacaatcaagatgaaaaaataaaaggggaaaaagtcatctgaacgattaagatgactttttcttcacgtccgagtacatattattggaggggctttatgtttaacttaccgaataaaatcacactggcaagaatcgctttaattcctgtatttatgattatcatgcttgttccttttcattggggcagcgttcatataggggatgaatcgattccggtcgcgcatcttacgggagctgttttgttcattatcgcatcaacgactgactgggtggatggctactacgccagaaaactgaacctcgtgacaaacttcgggaaatttttagatccgctggctgacaaactgctggtgtccgcggcattaattacgcttgtgcaatttgaccttgcgccggcgtggatggtcatcatcatcatcagccgcgaatttgccgtaacgggattaagacttgtgctggcgggaacgggggaagttgtagccgccaatatgctggggaaaattaaaacatgggcccagatcatcgctgttgccgcgcttttgctgcataatcttccgtttgagctcgtttctttcccgttcggcgatatcgctttatgggtggccgtgctcttcacagtcatttccggctgggattattttgcgaagaactgggatgcgttaaaaacatctaactaaggaagaaggacttaaagatggaaatagcaaaaaaagcagaaatcattgcggtcggctcggagcttctgctcggccagatcgccaatacgaacgcgcagtttatcagtaaagaactggcggaaatcggtgtaaacgtgttttaccataccgctgtcggtgacaatccggagcggcttaagcaagtcatccgcattgccgaagagcgctcagacctgattattttttcaggcggcctcggaccgaccaaggacgatttgacgaaagaaaccattgcaaacacactggggcgcccgctcgttctgaatgacgaagcgttccggtcgatcgaagaatatttcgcgaaaacaaaacggaccatgtcgccgaataaccgcaaacaggcgctcgtcattgagggctcggacgttttggcgaatcatttcggcatggcgccgggaatgcttgcagagcacggctcaaggctttatatgctgcttcccgggccgccgagcgagctgcgtccgatgtttgaaaatgaagcgaaaccgctgcttcttaaaaagcttggttctaatgagaaaatcgtttcaaccgtgctgcggtttttcggaatcggtgaatcccagcttgaagctgatttagaagatatcattgacgcgcagacgaatccgacgattgcgccgcttgctgctgacggcgaggtcacgctgcgtttaacggcgaaacatgctgacgaaaaagaaacagaacggcttttaaaagaaacggaagccgccattttagaacgtgtcggtgaatttttctacggatatgatgatacgtccctggtgaaggagctttcaaaagcatgcagacaaaacaaaatcacgatttcttctgccgaaagctttacaggcggcttgttttcagagtgggtgactgatttaagcggtgcgtctcaactatttgcaggaggtgttgtctgctattccgacagcgtgaaacagcatgtgctcggcgtgaaagctgagacgctcgcagaaagcggagcggtcagcaaagagtgtgcgaaagagcttgcatccggtgtgagaaagctgaccggaagcgatatcggcatcagctttaccggggtcgcgggtcccgacccgcaggaagggcatgcgccgggccgcgtctttatcggcatttcagcggaaggaaaagaagaggtgcacgaatttcactttgccggctcaagaaccggaatcagaaagcgcgccgctaaatacggctgccatctcattttaaaaatgctggatcaaaaataaagttttaaagagcttttttctctgatttttaagtttcataagggaaattatgctcttttgcagaaaagcgaacgcggaaaaaatccgaatatgcgttcgcttttttcttggcaaatgccagtaaacaaggtatagtatatgtagtggcaagataaaggaggaaaaaataaatgagtgatcgtcaggcagccttagatatggctcttaagcaaatagaaaaacaattcggcaaaggttccatcatgaagctcggagaaaaaacggatacaagaatttcaacggtgccaagcggctcccttgcacttgatactgctctcggaataggcggatacccgcgcggacggattattgaagtatacggacctgaaagttcaggtaaaacgactgtagcgcttcacgcaatcgctgaggttcaggaaaaaggcggacaggcagcatttattgatgctgagcatgctcttgatcctgtttacgcgcaaaagctcggtgtcaatatcgaagagcttctgctttctcagccggatacgggggagcaggcgcttgagattgctgaagcgctggtgcgaagcggagctgttgatatcgtagtcgttgactctgttgcggcgcttgttccaaaagctgaaattgaaggtgacatgggtgattcacacgtcggtttacaggcgcgtcttatgtctcaggcgctccgtaagctttccggcgccatcaataaatctaaaacaatcgcaatctttattaaccagattcgtgaaaaagtcggcgttatgttcggaaatccggagacgacaccgggcggccgcgcgctgaaattctattcttccgtgcgtcttgaagtgcgccgtgccgagcaattaaagcagggcaacgacgtgatggggaataaaacgagaattaaagtcgtaaaaaacaaagtcgctcctccgttccgtacggctgaagtggacattatgtacggtgaaggaatctccaaagaaggggaaatcatcgaccttggaactgaactggatatcgtgcaaaaaagcggttcgtggtattcttatgaagaagaacgcctcggtcagggccgtgaaaacgccaagcagttcttaaaagaaaataaagacatcatgctgatgattcaggaacaaatccgtgaatattacggtttagacaataacggtgtaacggacaaagcggaagaagttcaggaagagatggaattagaagaataaaaacacgatcaaaagagcggaataagcaatttccgctcttttttttgtatgtttcaaaaaaacactggctgtttcggaaaattttatctggaatgttacaacttttttcacccttcactcgtctaacatcatggcgaaagttgaaattatatctgaggaggaaaaaagatgacgagcccccgccgcacaagaataaataaaaaaagaaagaagaagctgatgaaaacgggagggctgtttctttttctgctgcttgtcactgtttttattatgatctggaccgtcacagcgcatcatcgggagaaggaatccgttaaaaacgctcccgccgctcaatctgatacttcaaaagaccagactcaacagaaaaaagaaaagacgcaaaaagagaaaacacctaaatcaatcgatcacaataaacagatcagcaattacttgcaacagatcgggttcagcggcacagcaatgatcgtaaaagatggaaaagttgtgctgaaaaaaggctttggctatgcagaccgaaaacaaaaaattaaaaacaatccggagacatcatattatatcggttcttcacaaaaagcgttaatcgcgacggctgtcctgcagcttgaagaaaaagggctgctgcagacgagtgaccccgtcagtacatacttgccgaattttcctaacggcacgcgcatcacattgaaaaacctgctcaatcatacgtccggcataaacgggcatattgagggtcggggaccgatttctccaattgatttaatcaaggatatagaataccgcggaattaaaaggcagcccggggtttgggattacagggattccaactattcagtgcttgcttatatcgcatctcaggtcagcggggagtcttatgaacaatatataaaagaacacgtgttcaaaccggccggaatgaagcatgccggattttacaaaacatttgctgaagccaaatatcctgccgtcggctacaaagtcgatgagagcggcagtcttgtaacgccgcaccttttggacttatcgcagctttacggggcgggcgacatgtatatgagcgctgaagatctttataaatttgataaagcgatcgtaaacggcacgctcctttcaaaagaaagcttcacaaaaatgtttacagcaggaagcagtgccgcttacgggatggggttttacattgatccgggcagctattccaatcacggtgttatgcccggttacaacattttaaacagtttcagccattcggcaagcaaatatgtcatattactgtcaaacattcagaataacgccaaattaggacaggtaaacaatagaatttaccaattgcttaaccaggcggactgacagagccgtcattcacgaaaagcggatgaaggtatggtatgatatatacatgggcggcgatccgagctgaaggcgaatcgttaagctggcaagcttgacaagtatttccgacacaattacaatgaagttgtaacatttgtttttttaacatgattgttaaaccatttaaacttgacaagggcatgagagactcattccctgtgaaggttctgtatgttgagaaaatcagacaatgtacatgccggcacttatttaagcaaaaaccaagttcatagcaagaggaggtgaaagtatgaccccaatgacggttctcatctccattttgctgactctgctcggtttagttgttggctactatgttcgtaaaaccattgccgaagcaaagattgcgggcgcacgcggtgctgccgagcaaatccttgaagatgcaaagcgtgatgctgaagcactgaaaaaagaagctctgcttgaagcaaaggacgaaatccatacacttcgaatagatgctgaacaggaagttcgtgaaagacgaaatgagcttcaaaaacaagaaaaccgtttacttcaaaaagaagaaaatcttgaccgtaaacatgaaggaattgataaacgggaagcgatgttggagaagaaagatcattctctgaatgaacgacaacaacatattgaagagatggaaagcaaagtggatgagatgattcgtatgcagcagtcagaactcgaacgcatttcgagcctgacacgggatgaagcgaaacaaatcattcttgaccgggttgaaaatgagctttcacatgacatcgccatcatgacaaaagaaaccgaaaaccgtgcgaaagaagaggcagataaaaaggcgaaaaacattctgtcgcttgctttgcagcgctgtgcagcagatcatgttgccgaaacgacggtatcggtcgtcaatcttccgaatgatgagatgaaaggacgtatcatcggccgtgaagggcgtaacattcgtacgcttgaaacgcttacaggtattgacctgattattgatgacacacctgaagcagtcattctttccggatttgatccgatcagacgggagacggcaagaatcgctcttgataaactcgttcaggatggccgtattcatccggcgcgcattgaagaaatggttgaaaaatcccgccgtgaggttgatgactatatccgggaaatgggtgagcagacgacgtttgaagtcggcgttcacggacttcacccggatctgatcaagatcctcggccggttgaaattccgtacaagctacgggcagaacgtactgaaacattctatggaagttgcgtttttagccggtttaatggcttccgagcttggagaagatgcaaagcttgccaagcgtgccggtcttctgcatgacatcggaaaagcaattgaccatgaagtggaaggaagccacgtggaaatcggagtggagcttgcgaccaaatataaagagcatccagtcgtcattaacagtattgcgtcacaccacggagacgaagagccgacttccattatcgccgttctggttgctgccgctgatgcactgtcagccgcaagaccgggcgcgagaagtgaaacgctcgaaaactatatccgcagacttgaaaagcttgaagaaatctccgagtcttacgaaggtgttgaaaaatcatttgcgattcaggccggccgtgaagttcgcatcatggtgaagccggactccattaatgatttagaagcccatcgtttggcgcgtgatatccgtaaacgaattgaggacgagcttgattatccgggacacattaaagtgaccgtgatcagagaaactcgagccgtagagtatgcaaaataaagtgatgcttagcgcatcactttatttttttgagtccctgaaaaggaaggaatggaatgtatgagaattttatttatcggagatgttgtcggttccccgggccgcgacatggtaaaagaatatgtcccgaaactgaaagcgaaacataaaccgcattttacaattattaacggagaaaatgcagcacacggaaaaggactgacggaaaagatctaccacagcctgatggaagcgggagccgacgccattacaatgggaaaccatacgtgggataaaagagagatcttcgactttattgatgatgtgccgcatcttgtccggccggcgaatttcccggaaggtacgccgggcaaaggcattacttatattaaatcgaacggaaaagagcttgccgtcattaatttacaggggcggacgtttcttccgccgcttgatgatccgtttgctaaagcggatgaattaatagaagaagcgaaaaagcgcacaccgtacatttttattgattttcacgcggaagcgacaagcgaaaaaattgcgatcggctggtatacagacggaagagcctctgccgtggtaggcacccatacacacgtgcaaacggcagataaccgcattttgccgaaaggaacggcatatattactgatgtaggcatgacgggtccgtacgacggaattctcggtatggacagagaaacggtcatcaagcggtttaaaaccaatcttcccgtccggtttacggtggcggaaggtaaaactacgctgagcggagtgctcattgacatcgacgatcaaacgaaaaaggccgtaaatatcgaacggatattaatcaatgatgaccatatgttctttgaataggtgatcatgtgtttattttataaaaatattaaaaggaaaagcaggaatatagcaacttcttagtgaatatagtagaaatggaaggtagcccgctatttttgaaaagcattgtggggatggctttttggatagcaacatctaataatgattgttctaatgaacactcacttatccattgtaaaactaagggggagcagaaatggaaatcttaaaagtttcagcaaaatcaagtccaaattcagtagcaggcgcgcttgccggcgtattgagagaacgcggagccgccgaaattcaagcaattggggcgggtgccttaaaccaggctgttaaagcggttgcgattgccagaggctttgtcgcgccaagcggcgtagatttgatttgtattccggcttttacagatatacagattgacggagaagaaagaacggcgattaagttaatcgtcgaaccccgttaaaaacaaaaatatgtacattctcaacctgcttgcgtaaggcgagcaggttgtttttattgctgtcatattttctcacaatattatattgatagtacgaagagatgataaatggctttattcatataatattcaaaaaaaatcccgcccatttttccggacggaagcagttgttttcctcgagtggacactggtgtttacctcctttttatctcatgttacaatccagttattacagtgttttttcgaggaggagtgtacatgttgggaggaaagatgaaagctatcgttaaaaatgaaaacgctttcggagcaacgctgaaagaaattcccataccttccattaatgagaatgaagttctcattaaagtacaggccgcatctatatgcggtacagatgtgcatatttataattgggatcaatgggcgcagaaacgaatcaaaacacctcaagtattcggacatgaattcagcggtatcgtagcggaaacgggcaagcacgtcacaaatgtcaaaataggtgactacgtttcggctgaaacccacttcgtctgcggtacttgtgtcccgtgtttaacagaaaaacatcatgtgtgcacccatacaaagatcctcggcgtagatacagccggctccttcgctgaatatgtcaaagtgccggcccgaaatgtttggaaaaaccccgctgatatggaccccgccgtcgcctctgttcaagagccgcttggcaacgcggtgcatacggtgctggaaagcagccggcttgcgggcggttccgctgcaattatcggctgcggaccgatcgggctgatggcggtggcggtggctaaagcggccggtgcatcccgtattgcggccattgataaaaatgattacaggctggctcttgcgaagaaattgggagctgcgatcaccatttcagttgatgaggaagatccgcttgaggtgatcgacaccttaacaggcggtgaagggatcgaccttgtctgcgaaatgtcaggccacccggcagccataacacaaggattaaagatggcggccaacgggggaaggttccacatgctgagtctgccggaacgtccggtgacggttgacctgacaaatgacgtggtgtttaaaggacttaccgtccaaggcatcacaggcagaaaaatgtttgaaacatggcggcaggtatcgcacctgcttgaatccggccttgttgatctgacgccggtgatcacgcatcagtttccgcttgaagactttgaaaaagggtttgacctgatgagaaagggacagtgcggcaaagtcattttgattccataaggggagggttctataatgaaagaatttgaatttctaaaagcagagcttgataaaatgaaagaaaataaaacgtggcagcaaatgaaacaaattgaaacgaagcagggtccgtcggtggaagtcaaaggggaaaacgtgatacagctttcatcgaacaattatctcggtttgacgtcgcatccaagacttgtcgaagcggccaaacgcgccgcggaagaattcggagcgggtacggggtccgtccgtacaatcgccggaacattcacaatgcacaatgagctggagaaaaaattggcaacctttaaaaaaacagaagcggcacttgtttttcaatcggggttcacaacgaatcagggcgtcttatcaagcattcttacaaaagaagatatcgtgatctctgacgaactgaaccatgcttccattattgacgggatcaggctgacaaaagcagataaaaaggtgtaccgccatgttgatatggacgatttggaaagggtgctgaaaaaatcaatgaattaccgcatgcgcctgatcgtcaccgacggcgtattctcaatggacggcaacatcgctcctttgcctgacatcgtcaaacttgcagaggcgtacgatgcctttgtgatggtcgacgatgcgcatgcttccggcgtactcggaaaaaacggaagggggacggttaatcacttcgggcttgacggaagagtccacatacaggtgggcacattaagcaaagccatcggagtgcttggcggttacgccgcagggtcgcaggttctgatcgattacctgcgccataaagggcgtcctttcttattcagcacttctcatccgcctgcagtaacggccgcatgcatagaagccattgacgtcctgctggaagagcctgagcatatggaaaagctatgggagaacacggcgtatttcaaagacaaactggttcaaatggggctgaccctcacaaaaagcgaaacaccgatcgtgccgatattaataggggaggaagaaaaagcccaggcattatcagaccttttattgacccgcggcgtgtttgcacaaagcatcgtgtatccgacggtcgcccaaggaaaagcgagaatccgcaccattattacggcggagcatacaaaagaggagcttgaccgggccctggaagtaatccgttcagccgcaaaagagcttcagcttgtgtaagggggaaatgattccctcttttttatttcttattgattcttattctcaataaggtgtacaataataggctggcggttgtgccaaacgcttttaaccagtatacttgagggtggaagtttcggttgaaaggagacattcgaacatgaatgaaaagcaaaagcaggaaagcggacaagtgaatccggcggacaaaaaatccgaaaaggattacagcaagtattttgaagccgtatatattccgccttctttaaaagatgcgaaaaaacggggcaaagaatccgttcaatatcataacgattttaaaatctctgaagaatttaaaggccttggtgaaggcaggaaattttatatccgcacgtacggatgccaaatgaacgagcatgatacggaagtcatggcgggtatttttatggcgctcggttatgaagcgacaaattcggttgatgacgcgaacgttattttattaaacacttgcgccatccgggaaaacgctgaaaacaaagtgttcggagagctcggccatttaaaggcgctcaaaaaaaataacccggacttgattctcggcgtctgcggctgcatgtcacaggaagaatcagtcgtaaaccgcatccttaagaagcacccgtttgtcgatatgattttcggcacgcacaacattcaccgtctgccggaactgttatcagaggcatatttatcaaaagagatggtcattgaagtgtggtcgaaagaaggggatgtcattgagaaccttccgaaagtccgcaacggaaaaattaaaggctgggtcaacattatgtacggctgcgacaagttctgcacatactgcatcgtaccgtatacccgcggaaaagaacgaagccgccgtcctgaggaaattatccaggaagtcagaagacttgcaagcgaaggctataaagaaatcacgctgctcggtcaaaacgtgaatgcgtacggaaaagattttgaggatatgacgtacggtctcggtgatttaatggacgaactgcgtaaaattgatattccgagaatccgattcacgacgagtcatccgcgtgactttgatgatcatctgatcgaagtgctcgccaaaggcggcaaccttttagaccatatccatcttccggttcaatcaggaagctcagcgatgttaaaaatgatggcccgtaaatatgacagagaacgctatctggagcttgtcggaaaaattaaagcggcgatgccgaacgcttcactgacgaccgatattattgtcggttttccgaatgaaacggatgaacaatttgaagaaacgctttcgttatatcgcgaagtggaatttgacagcgcatatacgtttatttactctcctcgtgaaggcacgccggcagcgaagatgaaagacaatgttccgatgagggtcaagaaagaacgtcttcagcgccttaatgatttggtgaaagaaatttcagccaaaaaaatgaaggaatatgaaggcaggactgtcgaagtattagttgagggagaaagcaaaaataaccctgacattcttgccggctatacggaaaaaagcaagctcgtcaacttcaaagggccgaaagacgccatcggcaagattgtacgcgtcaaaatcgaacaggcgaaaacatggtcgcttgacggtgtgatggcaggagaagcaatcgaggtgaaataatgatgacgctttactcaaagaaagacattgtacagcaggctaggaaccttgcgaaaatgatttctgaaacagaagaagttgattttttcaaacgcgccgaggcgcagattaacgaaaatgaaaaagtctctgcgattattaatcagattaaaaccctgcaaaagcaagccgttaacctgaagcactacgaaaagcttgaagcgctgaaacaagtggaaagtaaaattgacgccctgcaggaagagcttgaagggattccgatcatccaggaattcagagattcccagattgaggtcaatgaccttcttcagcttgtcgcacatacgatctcaaatcaggtgacaaacgaaatcattacatctaccggaggcaacctgctgacgggagaaaccggttcaaaagtaaaacattcgaataacagctgttctatttaaacacggggccttcatcggcccgtgttttttttgccgtttaagaactaattgtaatatgtactaaattttcattgtctcaacgttttgtcctatttttactggaaagttttatcatacttaaaagtaaagtttctgggcagggctgcatacaatgaaacagaaactttgtatttttatatttttattataaaaatgcacatgagacaaatgcccagcataagataacacgaagaagaacaaggaggcctgccggaatgtctgaatacagggaaattattacgaaagcggtagttgcgaaaggaagaaaattcacccaatgcaccaacacgatctcgcctggagaaaaaccgtcaagtatactgggcggctggattatcaaccacaagtacgatgccgaaaagatcgggaagactgtagaaattgaagggtattatgatataaacgtctggtactcttacgccgataatacaaaaacggaagttgtaaccgagagagtaaagtatgtcgatgtgattaaactcagatacagagatacaaattacttagatgacgaacacgaagtcattgccaaagtgctgcagcagccgaattgtcttgaagtcaccatttctcctaacggaaataaaatcgtggttcaggcagagagggaatttttagcagaagtggtcggtgaaacgaaagtcgtcgtcgaagtcaatcctgactgggaagaagacgatgatgatgattgggaagacgatcttgacgaagaattagaggacattaaccctgaatttttagtcggagatcctgaagaataagttgaggctaggggagtttaacaccccgagtctcttttttatatataaagatatcactcttttgtttatgttataatgggattcggataagagaagatacatagtgagggattaaatgatggctagttacacgcctatgatacagcaatacttgaagataaaggcagagcaccaagatgcctttttattttttcggcttggtgacttttatgaaatgttttttgaagatgcaaaaaaagcgtcgcaagagcttgaaattacactgacaagcagagacggaggttcggctgataaaattccgatgtgcggcgtgccgtatcattccgcggcggcttatattgaacagctgattaaaaagggctataaagtggcgatctgtgagcagacggaagatccgaaggcggctaaaggcgttgtaaaaagagaagtcgtccagctgatcaccccgggaaccgtgatggatggaaaaggcatccatgagtcggaaaacaactttatcgcttccgtttccgaatttcgtaacggatacggtctcgctttatcagacttaacgaccggagaaaacctggccgtatttattgagcggattgaagatgtcatgtcagaaatttactcagtcggcgcaaaggaaattgtcgtatcaagcaagtttaacgaacatacggctgctcagctgaaagaacggtgcggcgcaacgatttctatcgaagacggggaaataacagaacgcattgaaatcgcaaagcacttgccgggcgaagagctgacagagacgtttatgcgtttatatacgtatttgcagaaaacgcaaaaacggagcctggatcatctgcagccggttcaagtatatgaattggaagaagcgatgaaaattgacctgtattcaaaacggaatcttgagctgacggaaacgatccgttcgaaaagcaaaaaagggtcattgctttggcttttagacgagacgaaaacagcgatgggcggccggcttctcaaacaatggattgaccgcccgctgatcagggcatcccaaatcgaagaacgccaggaaatggtcgagacgctgatcaatcatctgtttgagcgcgaagatctgcgcgagcgcctgaaggaagtatacgatttagaacgtctggcgggccgggtcgcattcggaaacgtcaacgcaagagatttaatccagctgaaagaatctttaaaacaagtgccgagcattaaagagcttgtaggatctcttaaccataaaaaagcaaaagaacgcgccggcttgattgatccgtgcggagatttgcttgacctgttagaagaagcccttcatgaaaacccgccgttatcgttaaaagaaggcaacttaattaaagacggctatcatcagaagctcgatgagtaccgtgacgccagcaaaaacggtaaagactggattgccagactggagcagcaggaacgcgcttatacgggcatccgttcattaaaggtcggtttcaataaagtgttcggctattatattgaagtcacaaaagcaaaccttcatctgcttgaggacgggcggtatgagcggaagcagaccctcacaaacgccgaacggtacattacgccggaattgaaggaaaaagaagcgcttattttagaagcggaaaacaacatctgcgagctggaatatgagctttttgccggtctgcgtgaaaaggtgaaacaatttattccgcgtctgcagcgtcttgccaaacaaatgagtgagctggatgcgctgcaatgctttgctacgatcagtgaaaacaggcattacacaaagcccgtcttttctgataatgaagtaaaagtcattgaagggagacaccccgtcgttgaaaaggtgatggacagtcaagaatacgtgccgaacaactgcctgatgggcgattcgcgggaaatgctccttattacgggtccgaatatgtcaggtaaaagcacgtacatgagacagatcgcacttctatcgatcatggcccaaatcggctgttttgtgcccgcaaaagaagcggttctgccgatttttgatcaaatcttcacgagaatcggggcggcggatgatttgatttccggacaaagcacctttatggtggaaatgctggaagcgaaaaacgcgattgtgaacgccacaaaagacagcctgatcctgtttgatgaaatcggccgcgggacatcaacgtacgacggaatggcgctggcacaggcgattattgaatatgttcatgatcatatcggcgctaaaacactattcagcacgcattatcatgagctgacggtgcttgaagataagcttcctcagctgaaaaacgttcatgtgcgcgcagaggaatataacggaacggtcgtgtttctccatcaaatcaaagaaggagccgcagataaaagttacggcattcatgtcgcccagcttgcggagctcccggacgatctgatcagccgcgcgcaggagattttgaaacagcttgagcagacgggagataaaccggagcttccggcggcacctgagaaaaagcccgccgtcaaagaagaaccggcacagctgtccttttttgctgacggtgaaaaagaacagaaggcaccggctgtttctaataaagaaaaacaagtgcttgaagcttttaagtcaatcaatattctcgatatgacgccgcttgaggcgatgaatgaaatgtacaagctgcaaaaaaaattaaaatagaaagaggtgacggacttggcaaaagtcatccagctgtcagatgaactttcgaataaaatagcggccggcgaggtggtcgaacggcctgcctcagtcgttaaagaattggtggaaaacgccatcgacgcaaacagcacagtcattgaaatcgacatagaggaagcggggctttcgtcgattcgggtgctcgataacggcgaagggatggaaaccgatgattgcaagcgggctttccgccgccacgcgaccagcaaaatcaaagatgaaaacgacctgttccgggtgagaacactcggtttccgcggagaagctttgccaagtatcgcgtctgtttctcatctggaaatcaaaacgagcatcggcgagggggcgggaacccatctcattcttcagggcgggaatatcatttctgaacagaaatcctccagcagaaaaggaacggagattatcgttaccaacctgtttttcaatacgcccgccagattgaaatatatgaaaaccgtgcatacggagctcggcaatattacggatgttgtcaaccggattgctcttgcgcatccggaagtatccatccgtctccgccatcaggggaaaaatctgttgcagacaaacggtaacggggacgtgcgccatgtgctggccgcaatttacgggacggcggttgcgaaaaaaatgataccgctccatgtcagctcgcttgattttgaagtcaagggctacatcgcgcttccagaaatcacgcgtgcatccagaaactatatgtcatctgtcattaacggcagatacattaagaatttcccgcttgtaaaagcggtgcatgagggctatcacacacttctgccgatcggccgccatccgattacgtttatcgaaattacgatggacccgattttggtcgatgtcaatgtccatccgtcgaagcttgaagtccgcctcagcaaagagacggagctgcatgagctgatccgtgacgggataaaggaagtgtttcaaaagcagcggcttattccgagcgcccagctcccgaaaaaaacagcgccggcaccggccaaaaacgaacagcaatttatgacattcgaggaaagcgcgcctgagcggaaacttcctgaaaaaacgccggagccgtcttactcaccgatgaagctgagttcggtcgtaaaagagccggagccggtcatagaagaagagtccctgccggatgaagcaggtcacggagtgccgccggagctcggcatgccggtaacggaagcgcctgtttccgatattccggagcctgaagaggaggctgactctgaagaaatacgggaagaaagagttccggtgatgtatccgatcggccaaatgcacgggacgtatattttagcccaaaacgaaaacggcttgtatatcattgaccagcatgcggcgcaagaacggattaaatacgaatatttccgggagaaagtcgggcaggtcgagcctgaagtgcaggatatgatcgtgccgctcacctttcattatgcggcaaatgaagcgctgatcattgaccagcatcagcatgagcttgaaagcgtcggagtatttttagaagcattcggcacgaacagctacatcgtccgctgccatccggcctggtttccaaaaggggaagaagctgaactgattgaagaaatcattcagcaggtgcttgacgccaaacagatcgatattaaaaaactcagggaggaagcggccattatgatgagctgcaaaggctcaatcaaagcgaaccgccatttgagaaacgacgaaatcaaagcgctcttggacgacctgcgccgaacgacagacccgttcacatgcccgcacggccggccgatcattatccaccacagtacgtatgaaatggagaagatgtttaagcgtgtgatgtaataacaacgtttatgtgagactaaactgttatttacccacaagcagccttactagtttgaatgacccagcctttcagagataacttttgagttctggcataattgttgcatggtataccgtaaatcatgaagataatttgtttaacatccagttatttgggaaggatccctgaagtacaagatgaatactctgtatgcgggtacctgcttttacaaagtcacagggaagagatggggaagaatttaaataaaattggaatttggcgggttatactatccgcaagtcagtcaagggggactagtgattagcccccttacatttagttcttcctgcggtattttctatttttgatcaaactgaaaaccactaagagaaccacaccgacagcaacaatataaaatgaaatttccgctgcggcggtgttaatattcttaaggacaaggataagccctattaaaattataggaatgatgtaagttagaattcttatagctttcgggctcggttcagcattacttttatcttccatagttacctccgatcttaaacactttagaaaataatcactttaaagcttaacacaggataaatttgttaaacaccaacaatagccccatttaaaggaaaagcataagagttttagtaacccacaaagttgctgcctggttaccagttacttttagagcatccgcatagcacgcatcttcaactgcaccagtaaaattgtcaatgatattaagaattatttcaaaaccgccgattccacccatagcagctttaactttagtaggtattgcgtcccgagctgctctcagtgcttttatagctcaggacaaatcaccttgaacagtaaactccgacccatatcacatagtctatttgtctaaatcttaatatttactttttacacagtaaaaagataactttatttagccctaacaaaaacatctgagctccttgtcaataatcaaatataaatcgtcttcaactgacgtcttttttcatgcgcgacgctttcgtgaattgttgcagctagactggtttttgaacggttttctcgcaaaaaaaaagagtgtaaattaagctgtacttttctcagttcaattatgttaatgtcaacataacgttgaattcggtgtaagaactaaggtattctgatatatttcgagagcccgtgtggtttagtttatctgaagaaaaggattgaaataataatcttaattgcgggtcatttctaaaaactgattatctcctccggccgcttctgtaattgcttctcaaaacaaaagttcaatttgttttctttttatccgaaactcatattcatccttcattttctgaataaaattccctaaagaattcatctgaattaatattctgatttccttatatatcagcatagcaatttgtaaaaaaggcccagactggtgcttttggcgggagcagaaagttttttaaactttaccggaaaatccatggaaaaacgtggtgccatctggtaaagtggttacagtcggctgggcggcggcagcagtctgcccggatcttttaaatgggaatggtgacaatggatcatacatatgaagtgcatcaaatcaaaacttatcaccagatgtggtccaactattgttatattatcgcagaccgctcaaaaaaatctgcgatagcggtggacccgtcctgggaaatcgataaaataaccgataaactgcatgaattggatgttgatttatcagctattttattaacacattcgcattatgaccatgtaaacttggcggagccgcttcagcaaatctatcattctgatatatacatgtcgtcggcggaaatcgatttctatcaattccggtgcagaaacttaatagcgcttgaagacggacaaacctttgcggccggagggtttatcatcagaagtatattgaccccgggacatacggccgggggaatgtgctatttgctatctgatcacctttttaccggtgataccgtgtttacagaagggtgcggtatatgtgaggacaggggcagctcagctgaagatatgtttcacagtatacagaggatcaaagcctctattccgccgcatgtgcgtgtgtatccggggcactccttcggggagaagccgggtcaaaaaatggagagtcttttgaaaaacaatatttactttcagattgaaaaaaaagaacatttcgtgaatttccgcaacagaaaaaatcaaaaagggctgtttcactttaagtagcgtataatttggttctatctaactagtttttcttttaggccacggaacttctgaattgaaatgatagtcattgctcgctttttggtgatgaatggctgagtaacggtagtttgcggataaaagcgccgggcaggctgaatgggacattctgcttatgtctattccaaaagccctgagtccgccttccgtcagggaaaaataggcattattcaggattccgcataggataaattaacttgacatggtatttttgtgaagttactatcaacttgaacatgcttcttaactgaatccgagaaaggatggctgagaaaatgatcacatacatattccccggacaaggttctcaaaagcagggaatgggaagctcattgtttgatgaatttaaagacttaacggagcaggctgatgaaacactcggatattccatgaaacggctttgtcttgagaatccgtattccaatcttcacaagacgcagttcacccagcctgctttatatgttgtaaacgcgttaagctatttgaaaaaaatccaagaaaatgacataaagccggattatttggccggccacagtttgggagaatataatgcgctgtttgcagcaggtgcttttgattttattaccggcctgcagcttgtccgtaaaagaggcgaattaatgagtatggccactgacggaaaaatggccgccgttatggggttaaccgcagctcaagtgtcggacgcccttcaaacgcacggattacatacgattgatattgccaatatgaattctcctcaccaagttgtcatatccggacgcaaagaagacattgaaagagccaaaagcgtattcgaaggaataaaggacgttacgatgtttcatccgttaaacgtcagcggcgcttttcactcgagatatatgagcgaagcaaaacaagagttcgaaaaatttttacagtcatttcatttttctgctatatcaattcctgtcatttctaatgtgcatgccaggccttatgagcaagacggaatccactccgttctggccgatcagatcgaccattcagtgcgatggaacgacagcatgcgctatctgctggacaaagggcggatggaatttgaagaagtcggcccgggccatgtgctgacaggacttattcaccgcatcaaaaaagaaactgaagcttcacccgccatgtagcggaacgcaagtcaaaattcttatctcacataatagtgccagccatacaacatcacgaccacttcacctgcacacaacatcaagaaaaacttacaaatcaatattttaaaaaaataaagagcaaaaaggagaacaaatgaaccagccaattgttttcatgttttctggacagggttcccaatactatcaaatggggaaagagctgtttgcacataacgccgcttttcggcagaaaatgcttgacttggacgattttgcagtcagccgtttcggttactctgtcctgaaagaggtttatcatacaggcaatcgtctgtctgatccatttgaccgccttcttttcagccatcctgccatttttatggctgagtacgcacttgcatatgctttggagcaaagaggcatacgtcccgattatgtgatcggagcaagccttggagagtatgcagcggccgctgtgtcgggtgtgctgagcgctgaggatgctttagattgcgtgctggaacaggcccgaatcattacggaaacttgccgtaacggcagcatgcttgcgatactgggtgatccggctttatatcaagatgatccgctgctcggcgaacatagtgaattggcatctgtaaactatcattctcactttgtcatctcgggagagcgggaacatatcaaaaagatcatggacgatctgagagaaaagcagattcctcatcagctattgccggtatcttacgggtttcactcagcgctggttgatcaggcggaacagccgtacaagcgctttttagctcagaaattaatccggactccgtttataccgtacatctccagtgcgaccggagaggctgagaccgatatacaagcggactttttctgggatattgtaagaaagccgattcaattccgcgaagcgcttcaattcgcagacagccgccaaaaaggattgtatatcgatgccgggccttccggaacgttggccgcatttgccaaacagattcttcccgcaggatcggctgaacgcatccgtgccattatgacgccgtttcataaagaacaaacccatttgcagcaaatagaagacagcattttatcaccgcccggaaggagactgtaagatgatcagctttgtttttccaggccaaggctcgcaaaaaatagggatgggagaggacctgttcggccgctatcctgaattaaccgcaaaggcggatcacattctcggatattccattcaggagctgtgccgggacggagaacgtctcaatcagactcaattcactcagccggcgctctatgtcgtcaatgccctcagttatttgaaaaaaacagaagaaaccggcttgaaaccggattttaccgccggacacagtttaggcgaatataacgcgttatacgcctcgggcgcttttgattttgaagaaggcctacagctggtcaaaaaaaggggcgacctgatgagccgcgcaaaaggaggcggcatggcagcggtgatcggcctgactcatgagcaggtgacggacgttttaagggagtatcacttgcatacgattgatatcgccaacatgaacactccgcagcaaattgtcatttccggatataaagaagatattgaaaaagccgcatccgtttttgaagccgtaaacggcgtaaaaatggttcaccgcttaaatgtcagcggcgcctttcattccagatacatgctggaagcgaaggaggaattttcacggtttattgaaactttccattttaagccgctgtccattccggtcatttcaaatgtgacggcaagaccttatgagcagaccgagctgaaaaagacactcaccggacaaataacgggatcggtgaactggacagacagcatccgttttttaatgggaagaaagaacatgatctttgaggaaatcggtcccggaaaagtgctgacggggctgattcaaagaattacggctgaagcggagccgataacagatgaaatcaaagtcccggctgaagctggaaaaagctcaattacggcggagtctttaggaaatgaagagtttaagcgcgattatcaattgaaatacgcctacttggccggcggcatgtaccgcggaatttcttcgaaggaaatggtcgtcaaactggccgaaaaaggaatgatgggctttttcggaacgggcggtttgaacatcgcgcacgttgaggacgccattttgtcaattcagcatgagcttcgtgacggcggttcctttggcataaatgttgtacataacatgaagcatacagattcagaagaaaaaatgattgatcttttactgaagcatggggttcagaacttggaagcatcagcatttttaacggttactcctgctttagtaaggtttcgcgctaaggggttaaaacgcggtgccggcggacaaataatagcgcgtcagcggattatcgcaaagctgtcccgtccggaagtagcggaagcatttctcagcccggcgcctgatcacattctgcagaaacttgcagccgaaaacaaaattaccgctgaagaagcaagtctgatgagagaaatacccgttgcgcatgacatctgcgtagaggctgattcaggcggccacactgacggcggagttgcttacagtctcatgccggcgatcatccgtttacgagatgacatgatgaaaaaataccgatacggcaaaaccgtccgcatcggagccgcagggggaatcggaacgcctgaggctgctatggccgcatttatgctcggcgctgattttattgtgaccggatccattaaccaatgcaccgttgaagcagcgacgagcggcctcgtaaaggatctcctgcagcagatgaatgtacaggacacggcctacgcgccggccggcgatatgtttgaatcaggcagcaaggtgcaggtattaaagaaagggctgttctttccgacccgggcctctaagctgcatgaactgtatcagcgtcaccgctcaattgaagaaattgatgaaaagacactcagacaaatagaagagaagtattttaaggcaagtgtaagcagtatttatgacaaagtgaaggctcattattcgaatgaagacatttcaaaagccgaacggaatccgaaacagaaaatggcgctcatattcaaatggtatttcaggcaaagctctgcttcggcgattaaaggagacccggatgccaaggtagacttccagattcattgcggcccggcattaggcgcctttaatcaatgggtgaaaggtacggagctggagtcctggaaaaaccgccatgccgatggtatcggccttcgtcttatggaagagacggcctcgcttttgaatcagaagttaggctcatttctgcaaacgtgttgacaagacgaaatgatagattgaaaacatggaatattcataaaagatgaaacagggaggaactgacaatgagtgaagaaagaatctttgaattgctgcagaacacaatctacgaggttttgcctgatttagaaggcgaacagctttcaaaggaagaccggttagttgatctgggggcggactcagtggaccgcgccgaaattatcacgatgatgcttgaagaattatcactgcagatcccgcgtgttgagctgacgggagtgtcaaacatcggcgaattggcggcaaagctttatgaaaaggtacaggctgtctgataaaacggtgaaaaaatcggaaactcaaaattcatattggaggcgaagttcatggcggctgccggaatagaagcgataaatgtgtttggcgggacggcataccttgatgtcatgcagctggcggagtacagaaacttagaccctgccagatttgagaatttactgatgaaagaaaaagcggtggcgcttccgtacgaagaccccgtcacattcggcgttaatgcggcaaagccgattatcgaccgattgacagaggctgaaaaagacagaatcgagctgctgattacctgctcggagtccggcatcgacttcggaaaatcactcagtacatatattcatgattatttaggcctcaaccggaactgccgtttatttgaactgaagcaggcctgttattcaggaacggcgggtttgcagatggcgcttaattttattttgtcgcagacatcccccggagcgaaggcgcttgtcgtcgcgacggatatttcccggtttttaattgccgaaggcggcgatgcgttaagcgaggattggtcttacgccgaaccgagcgccggagcgggtgccgtcgccttattgatcggtgaaaacccaatcgtatttcaggcggatgcgggcgccaacggctattacggctatgaggtgatggatacatgccgtccgatcccggacagtgaagccggtgacgccgacttgtcattgatgtcttatctcgattgctgcgaacagacatttcgcgagtacaaaaaccgtgtgccgggcgctgactataaagagacgtttcactatcttgccttccatacaccgtttggcggcatggtcaaaggagctcaccggacgatgatgcgtaagcttgcaaaagcgaaaaacgctgagatcgaacaggattttcaaaccagggtagagccggggctccgctactgccaaagagtcggaaacattatgggggcagcctctttactggctcttgcaagcacgattgatcaaggggctttcgacacttctaagcggatcggctgtttctcgtacggctccggatgctgttcagaattttacagcggcgttgtgacgcctgaaggacaaacgcggcagcattctttcaaaatagaagagcatctgaacaacagatacaggctgtccatggaagagtatgaagaactgtttaaaggcagcggtctggtgaagttcggaacccggaatgtcaaattggatatgaatatgattccgaacattttagaccatcatgccgggagccctcgtttatatttggaagaaatcacggaatttcatcggaaatacaggtggatcccgtgacctatgagacgatcaacgtccgttttcagcaaaatgtctgcttcatcacctttgatcggcctgaagccaacaatacgattaatgagcgtttagtggaggaatgcctgcacgttcttactgaatgtgaagactccgtgacctccgtagtgcttgaagggcagccggaggtattttgtttcggggcggattttgatgagatgtaccggaaaatgaggcagggaatgcagcatgcggaatcgcaggagccgctttaccgtttgtggctggcattaaaatccgggccgtacatcacaatcgcccgcgtccgcggaaaagtaaatgcgggaggtgtcggttttgccgccgcctgcgatatcgtcattgcagaggagagtgcttcgttcagtttatctgaactgttattcggactttatccagcctgcgttctgccgtttttaattcaaagaatcggatttcaaaaggctcattatatgacgatcatgacaaagcccgtgccggcacgccaggcgcttgaatggggactttgtgacgtatgcgtcccggactcagcaacagagctgagaaagcatttgctgcgtcttcgcccgctgtcgaaaaaagcagtcatccgctataaaaaatacatggattccttaaacgaccttgttcatcgttcgaaatccattgctctagccgaaaatcaagcgatgttttcagatccggataaccaatcagccattttccgttatgcagaaacggggcggcttccttgggaaacggagaacagttaggaggatatcatgccgaacgccgcagttgaactgctcgaaattgaaccggatattatccaagtgacaatgcaggataaagcccataaaaacgctttctccaaagaactgacggatggattgatggaagcattcacccgtataaaaaaatcgtcagtctataaagctgtgattttaacaggatacggccattactttgcttccggaggcacacaggaaggtctgctcaggattcagcagggcatcacgaagtttacggaagaccgcatgtattctttggcgctggaatgtgatatccccgttatttcagccatgcagggccacggaatcggaggcgggtttgtcatggggcttttcagtgattttgtcattttaagcaaagaaagcgtgtataccgcaaactttatgaaatacggtttcactcccggaatgggggctacctttatcgttccggagaagcttggggcaagcctcggccatgaaatgctgttaaacggcggccactaccgcggcggtgacctggagaaaagaggagtgccttttccggtgcttccgcggcaggaagtattagactatgcgcaggaattggcccgtgagcttgcggaaaaaccgagaaactctttaattacattgaaaaggcacttggtgacgccgtttcgcgagcagcttccggctgtcattgagaaggagttaatcatgcacgatgagacgtttcatgatgatgaagtgaaaaaacgaatcacgacgatgtacggagtataagacatacatcttacatacagatgaaatggaggcagctctatgaaaagtgatatgaaggcaagcgggttactcaagccatctgtcagctacggaaaaccattgcggctttcagcggatcagccgatgacgattcctgaagtcctgcacaaaaccgccgcggcagcgggagatcaaaagggcatcacatatatacagcctgacggcaccaaagtgtaccagacttacagcggcctgaaaaagatcgctctttcgattgtgaaagggctccgccaatcaggagtgaaggctcaggatgaagtcatattacagctcagtgacaattcccagctgattcctgcgttttggggctgtgtttttttaggagcgatcccggttccgcttgcggccgctccggcttatacagaaatgaacagcgggacgcaaaaactgaaagacgcctggacgcttttgaatcagccgtatgtcatcacaagccgtgaagtgctgccggagatgactgaatgggcggaggagcaggagctttccgggttttgcgctttggcggcagaagatctcagtgcgcatgaaatggatacggactgtcatcatccccgtccggaagatttggcgatgctgcttttgacctcgggaagcacgggcacgccgaaagccgtgatgctcagccatgaaaacatcgtctgcatggtcaaaggaaatattcagatgcagggctatacaagtgaggatgtcacgtttaactggatgccttttgaccatgtcggcggcatcggaatgcttcatctgcgtgatgtttatctcggatgtgaggaaatcaacataccgagcgaatccattttgatggatcctttaaaatggctcgacctgattgatcattaccgcgcttcggtcacgtgggcccccaattttgcctttgggctgcttgccgatttcgcagaagagattcaaacacggaaatgggacttatcttccatgcgttatatgctgaacggcggggaggccgcggtggcgaaagtcggacgcagaattatggagcttttagagccgcacggtctgccggctaatgccatccgtcccgcatggggaatgtccgaaacgtcttcgggcgtaattttctcagatgagtttacactggaaaacacgagtgacgacgatcgtttcgtcgagatcggtctgccgatcccggggtttaatatgagaattacggatgaccgcaatcaagtggtggaagaaggagaaatcggccgctttcaagtgtccggtctgactgtaacgagcggatattatgagcgcccggacttaaacgagagtgtctttacagaagacggctggtttgaaacgggagatctcggatttctgcgtgaaggccgcctgacgataacggggcgcacgaaagatgccatcattatcaacggtgtgaattattacagccacgccattgaatcagccgttgaggaattgccggaaattgaaacgtcatatacagcggcatgcgccgtccggccgaatcaaagcacgacagatgagctggcgattttctttgtgacgtctgttccattggatgagaaccgcatgacgaagcttattcatcacattcaccagcacgtgacacagagaatcggcgttacccctgattatctgcttccggtcgcaaaagaagacattcctaagacggcaatcgggaaaatccagcgcactcagctgaaacattcattcgaacaagggcaatttgattcattacataataacagacaagaaggcggcaattcagccccggcttctgcagagaaagaaattgaacgggattttatccgttttctgaaagaggaactttccatcgcggatgagcttgttgatccaaatacaccgtttcaaagccttggcgttaactccatcaagatgatgaaactcgccagatcaattgaaaaaacgtatcacatccggctgacggcaagagagctgcacaaaaacccgacgattggcgctttagcggcttatactgctgaaaaagcggcaaacatgtcagcggagcatcattcccaaaaagccgaaccgccggcagaacgggagagacggcaaacggcgccagcgctttcagaagtccaaaaagggctgtggacattgcagaaaatgtcgcctgaaacgactgcataccatgtcccgctctgtttccgattcacaaccggaatcgacaaagagaaactgaaacaggcgtttcagctcgtattaaagcagcatccgatgctcaaaagcgccgtgaatgaaacagacggcgggttttatttcatagaagcggcagatccttttgtattctcggaagaagatatttctgacgtcaatgaatcacaaatacccgctctgatacggaaaaaagttaaagagccgtttgtcaaagaaggcgggcctttgctgcgcgtgcggctgctttcaaaatccgcctcggaacattatcttttgacggtcattcaccacatcgtgtttgacggtttttcatccattacatttattcacagtctgctggatcattatcaggcgctgctggagggaaaagaagagtttgcggccgccgctcccggcattcattccgatttcgcggcttgggaaaagcggtatttagcgggtgaagaaagcaaagctgcccgcgcttactggatgaaacagctcgggggcgatctgcctgaccttcagcttccgccgatgcgcacgggcagcagcgttccggagtttacagaagatacgctgacacgccgtcttcccgaacggctgctgaataatctaacggcgtttgccgcatcccgttcgattcatttgtctaccgttatgctgagctgctatatggtgcttttaagcaaatatacagataaggaagatattgtgacaggcatgcctgcgatggtcagacctgaagaacgctttgacggagtggtcggccatttcctcaacatgcttcctatacggagcagagccggacgaaaagaaacatttgctgactttgttcaaaaggtgcaggatgccgttctggacggactggatcactccttttatccgtttccgaaaatggtgcgtgatgtgcatgcgaaacccctgcagaacggttcgcctgttttcagcaatgcctttttctatcagaactttctgcagtattcaagctatcaatcgatgctggatgaatacaaggaattctcctgtgagtttgtaaaagacattcatcaggagggggaatatgatcttgtatttgaaatgtgggaagaagcatcaggcatggatcttacgattaaatacagcaccgaattattcgacgaagcaggggcggccagacttttcagccaatttgtacaggccgctgaagctttgacggcgaatccggatatgccgcttgagaacgtttctctcatgacaaaaagagaggagcacatgattcttaagacttggaatgagacaagccgtgaatatccggatgcctgcttccatgaattattcgaacgtcaggcggcagaaacgccggacgcttgtgcggtcgtgtatgaacagcaaaagctgacgtaccgtgagcttgatgaaaaaagcacgaagctggcgctctatttgcaggcgcacggtgcaggccctgatgatctcatcggcatttatacagaccgttcattgcatatggctgtcggccttctcggcattttaaaagccgggggagcgtatgtgccgcttgatccttcttatcccgctgacagattggaatatatgatcgccgacagcaggatttcaatgtgtctgacgacagctgatttagagcactccttgaactggggaggcgtgcagacaactgccattgaccgcgattggtctcgtattgaaagtacagccgcggaaagaacgtcgctgaagcggttagtgacacctgacgatctggcgtacgtcatttacacgtcgggcagcacgggcaaaccgaagggcgtgatgattccgcaccgggcgctgaccaatttcttaatctcgatggcgaatgaaccggggcttacgtccgaagacaaactgcttgccgtcacgacatattgctttgatatcgcggcactggagctttacctccctttaatcaaaggagcagagtgcaacatctgtaagacagaattcacaaaagacgcacggaagctgaaagagctgattcaagagtacaaaccgacgatcatgcaggcgacgccgtttacgtggaaaatgctctttcattccggatggtcaaatgaagaaaaagtgaaaatcctttgcggcggagaggcgcttagcgaacaattgaagcagcagtttctcgatacgaaaagtgaggcttggaatatgttcgggccgacagagacgacaatctggtccgcggtgcagcgtataacggaaaatgagagcgcgcttacgatcgggcgcccgatcgccaatacccgtgtgtatattatggattccgctctcaaccctgttttagaagggatgccgggagaactttgtattgcgggagacggattggcaagagggtatttcaacaagcctgagctgacagataacgttttcgtcagccaccggctcgaattgggatcaaagctttataaaacaggcgatatggcgcgttttcttcccggcggccgcattgaatacatgggacggatggacacccaagtcaaaatccgcggctaccggattgaacccggagatattgagagccggctgaatgcctatccggccgtacaggaaagcgtagtggttgtgaacaatcactccggaaatgaaaaactttgcgcattttatatcctgaaaaacggagagccgcttccgtctgcaaaggaattgcgcaatcatttgaaacaagcgctgccggcctatatgacgccagcttcgtttatccgtcttgaagagctgccgctcacaccgaacggaaaagttgaccgcaagcttcttgctgcccgcgatctgacggaaaagcagccggacacacaaacattttcatcatctcatatccagcaggcggtgctggcgatttggcaggatgtattgaaaagcaaagatatagagcttgatgaccgcttttttgatgcggggggagattcgcttcttgccgtgactgtcactgaccggatgacgcaggaactggattgtgaattcagtgtaacggagctgtttgaatacgcgacggtaaaagacatcagccggtacatcacagaacaaaaactgaaagaaaccgttttggctcctgtgccgcaaaagaaagtgaatacagaagaccgggaacacccagcgggagaaattcccgattattatgaggacagtgtcgcggttatcggtatatcctgtgagtttccgggagcaaaagatcattatgaattttggaataacatcaaagaaggcaaagaaagcatcaacttcttttcaaaagaggagctccgccgatccggtgtttctgaagaactggctgatcatcccggcttcgttccggctaaatcagttttagaggggaaagaaatgtttgatcccggtttcttcggcttttcaccgaaagatgcggaatatatggaccctcagctgagaatgcttttgctccattcatggaaggcaatcgaggatgcgggatatatctcaaaagaaattccggaaacaagcgtgtatatgtctgcaagcacgaactcttaccgcagcctgctgccggaggagacgacagcacagctggaaacgccggatggctacgtatcatgggtgcttgcccaaagcggcacgattccgacgatgatttctcataaactcgggttgaaagggccgagctattttgtccatgccaactgctcatcttcgttaatcggcctgcattcggcttttcaaagcctgcattccggcgaagccaagtatgcccttgtcggcggtgcgacccttcatacggaatcaagtgccggatatgttcatcagccggggctgaatttttcaagcgacgggcatattaaagcgtttgacgcggctgctgatggaatgatcggcggtgaaggagccggcgccgtgctcttgaaaaaagcgtcggatgccgttaaggacggcgaccatatttatgcgctgctgcgcggaatcggcgtcaataacgacggagcggataaggtcggattttatgcgccgagcgtcaaaggacaggctgaggtcattcagaaggtcattgatcagaccggcatccatcctgaaacgatcgcgtacgtcgaagctcacggcacaggaacaaaactcggcgacccgatcgaactgtccgcacttcaatcggtgtacggccgatatacagataaaaaacaatactgcggcatcggttcagtcaaaacaaatctcgggcatttggatacagcggccggaatggcgggctgcatcaaggttgtcatgagcttatatcatcaggaaatcgcgccgagcatcaattacaaagagccgaacccgaatcttcatttagaagactctccgttttacgtagcgggagaaaagaaagagttaacccgtgagaacagagcgcaccgcatggctttaagctctttcggtcttggcggaacaaacacacacgcgatttttgaacaatatccggatgcatccgaagcagcagacgctgccggtccgttcatcattccgttgtctgccagaaaaaaagatcgtctgaaggagtacgcaaaacagctgctggcttttctggaaagaaaaacggacgccggcctcgctgatcttgcctacacgttccaagtcggaagggaagcgatggaagagcgcgcggcctttatcacaagcggcactgcggagctcaagcggcagcttgccgattttatcaatgataagccggctgtaacaggctgctttagaggagaaaaacagcaggcaaaagatattgcctggctttctgatgatgatgacagcgctgaactcattgagaaatggcttgcgaaaggaaaaggaacgaagctctgtgaaatgtggagtaaaggtgtcgccattaattggcacaagctttacaaagacaagcatccgaaacggatcagcgtgccggtctacccgtttgcaaaggagccgtactggccgaaaaaagcagaaaagaaaacatctgccgcacacaccggagtctcagttttacacccgcttgtgcagcaaaatacgtcagatttggccgttcagcggttcagctcacggtttacaggctcagaatttttcctgaaggatcatgtggtcagggaaaaagcggtgctgccgggagcggcatatttggaaatgtcttatgaagcggtaaaacgggcgcttggcggcttattaaaagaccaagacagaataacgctccatcataccgtctggatgaaaccgatcgtcgttcacgaacaagagcgccaagtccatatcgcgctgtttcctgaagaggacggcatcatctcatatgacatttacagcgtaaacgctgacgatgaagaagtgctgcacagccaaggacgggctgaaatcataaaggctgaacgagagcctgaggccgacctttctgccatacaaaacagatgcacagcggacattcttgatccggcggccttttatcgggaaggccggagcagggggatgttccacggaaaagccttccaaggcattaagtccgcctttatcggcgagaaagaagtgctttcggatatacagcttccggattctgtttctcatacgaacggacaatttacgcttcatccgagcatcattgattcggctattcagacggcgacgatctgcattatgcaggagttttccggacaaaagctgattctgccgtttgcgctggaataccttgaagtcatcaaaccatgcacaccgactatgcgggcgcatgcacgcttcagcgaaggatatcaaaccggtgattccgtgcagaaagccgacattgacctgttcgacgaaacaggagcgctttgcgtgaaggtgagaggattctctacgagagtgcttgaaggcgatgcagaatcggctcagcggccatcaggctcggaaaaggtcttgtttgcaccggtttggaaagaagccgccgcatccgagaaagcttctgtccatgctgatgagcatttgatcatactttgtgaagatgcctgccgtataaaagatgaagcggcatccggcctgaaagacgccgagctgctgattgcagaaggtgagggagaaacagccgctgaacgcttccaaggctacgcgcagacaatcgccgaacacatccggcggatcatcagcgaaaaaaggcagggccgcattctgattcagactgttatttcagcagacggcagccagcaattgtttgcggggttaacaggtttgttaaaaacagccgagctggaatacggaaaacttgactgtcagctcatcgagatggaatcaatcggcgaaatgccggctgccgctcaaaaactgaaaaacgacagccatcggccgcatgataaacatatccgttatacaggagaaaaacggtatgtgaaggcttgggaagaaatgcatcctgcaggtggcggcgccgtctggaaggacgaaggcgtatatctgattaccggaggcgcaggaagcctggggttgatgttcgcaaaagaaatcgctggtcgcgtaaaacacccgaaaatcattctgaccggccgctcaaatctggcagaagccaaacagcgtgagcttgctatgcttcaggactcaggcgcaaatgtcgtctacaaaaagctgaatgcggcagaccggcgggaaaatgaagcgctgataaaagagattacggcggaattcggggagcttaacggaattattcacgcagcgggcgtgatacaagaccgtttcctgctgcaaaaaacgaaggaagagttctgggaagtgcttgatccgaaagtgatcggcaccgcttatttagatgaagccagcaaagactgcaaccttgactttttcgtattgttctccagtgtttccggcgttctcggcaatgtcgggcaggctgattatgccgccggcaacgcgtttatggatgcatacgccgcttacaggcaatcccttacggagaatggcctgcggcacggaaaaacgatcgcctttaactggacgctgtggaaagatggcggtatgcaggcgggagacgagacggaaagaatgatgaaaaaagctttcggcatggttccgcttcaaaaggcgtcaggcctggctgcattttatgaaggaatggctcaggaaaagccgcagcttttagcagctgaaggacacgcagcaaaattaaaacagtcgttcctgtccgtttctgaaactgaaaagccgcaggtggagaaaatagaacctgtatccgccgtttcgggagacaaatggcacggtgcgcttatcagattggtcagttcaattttaaaagtcggccaagacgagattgatattgatacggaactgagtgaatacggttttgattccgtatcctttaccgtctttacgaatcaattaaatgaagcgtatcagctggagctggcaccgacgatcttcttcgagcacgggacgatccgcagtttagcagagtatttgtcggatgaaacagagagaggtcttccttttcagccggaagaaaaacacgatgcagaagaatctcttcaagcgcttcacaccgctttgacagccatggtaagcagcattttaaaagttgaccgtgaggacattgatacagatacggaactgagtgaatacggttttgattccgtatcctttaccgtctttacgaatcaattaaatgaagcgtatcagctggagctggcgccgacgattttctttgagtacggaacgatcagtaatctcgccggatatttggcaaaagagcatccgggccgtttcggcgaaaagaagaaggagtctccgaaaaaagagcagccaaaagcccaaaaaccgaaaacgcatcggaaaaagcgtttcgcaacggtgatgaacgctagggcagcgacacaagagccgcgccgcttgaacccggttgccattgtcggaatcagcggccgattcccgggcgcgaaggatatagaggaattttggcgcaatctgaaagaaggaaaagattctatcacaaccattccgaaagaacgctgggattggcaagcgtttgatggcgacccgaatcttgaaaggaacaaaacgaatattaagtggggcggctttatcgacggaatagctgaatttgatccgctgttctttgggatttcaccgcgggaagcccaatatttagatccgcagcagcggctgttattgacttatgcatggcgggcgatagaagatgcgggctgtaagccggaaagcctttccggcacaaatacgggtgtctttatcggcaccggaaataccggttataaagatttgttcacaagggcaggtcttgcgccggaaggacatgcggcgacaggcagcatgattccttccatcggtccgaaccgtttaagctatttgttaaatcttcacgggccgagcgagccggttgaaacggcatgttcaagctcgcttgttgcgattcaccgggcggtatccgctatagaaaacggagaatgcgacatggcgatcgccgggggaatcaacacgattctgacggaagaagcgcatatcagctacagcaaagcaggcatgctcagcaaagacggaaaatgcaaaaccttctccaaagatgccaacgggtatgtcaggggagaaggcgcgggaattctgatgctgaagaaactgacagatgcagaacgtgacggcaatccgatttacggcgtgatccgcggtacggctgaaaaccacggcggccgggcgaatacgttaacctcgccgaatccgaaactgcaggctgatttattggtgaaagcatatcggaaagcgggagtggacccgagcaccgtcacgtatattgaagcgcacggtacaggaacggaattgggcgacccgattgaaataaacggtttgaaagcggcgtttcacgagctggcgaaaacaaatcaagagcctgaagtctccgatcaccgctgcggcatcggttcggtcaagagcaatatcggccatttagagcttgccgcgggagtatcaggcgtcatgaaagtgcttttgcaaatgaagcacaaaacgctggtgaaaagcctgcattgcgagacgatcaatccgtacattcagctcgatgacagtcctttctacatcgtgcgggaaaatcaggaatggacggcagcgaaagatagaaacggaaatgccattccgcgccgggccggggtcagctcatttggcatcggcggggtcaacgcccatatcgtcattgaagagtatgtcccgaaagcagccgctctgcctgagcacagcccggaaaatccggcaatcatccttttgtccgccaaatcaaaagaaaaactgttcgaacaggcgcagcagctgcaaaaagcgatccgtcaaacgccgtatacagatcaagacttggcgggcgtcgcttatacgctgcaaaccggaagggacgaaatggaagagcgcctggccattcttgcagcgacgatggcggaattggaaacaaagctggaagcatttacgaaaaatgagaaaaacatcgccgggctgtataccggccagtctcaccgcaataaagatacgtttgccttgttcacggcagatgaagatatggacatcgtcattgacgcctggattaaaaaaggaaaattcgccaagctggcagaggtatgggtgaaaggcggcgtgttgaattggaaccggctgtatgaaaagggtacgccgcgtttactcagtcttccgtcttatccgttcgcaaaagacacgtattgggtgcctgagaatcctgacaaaaataaggtccatacagaggaacggatgaaacgtattctgacaaaacaatgggaaccgagcccgctcgaactgcgtgaaccgtgcccacgttccgttgcgattttgacaggcggggacacgatcaatctcgcagaagagatcgcagcgcatatgccgaatcaccgtattatcacaacatcagaccttacaggtgaatatgactggcaggcgtttggcggagtcatcgaccttctcggtgcagcgaaagaagaagcttctggagatatgaccggtatcaaatggcttcagcaattgattgagcatgggcataaagaagggataacactgctttgtgtcacgaaagaccttgagtcaatggggaaaaaggccaatcaaataacgggagcaaaacgggccgggctgtacagaatgctggcatgcgagtacagtcatctgtcttcaaggcatctcgatcttgaaggagcgctttcggatgacaaactggcgaagcagattgccgatgagtttcatgcccgtactgatgacgcggaagtttgccggagggacggcttgcgctaccgcgccgtattgagcggttcagaaaatatgaatacgcaaggcgagagaattgattttccggaccaccatgtgcttctgatcaccggagggacgagagggatcggtcttttatgcgcacgccattttgccgaacattacggagtgaaaaaactggtgcttacaggccgtgagacccttccgccgcgaagtgagtggacgggcggactgaatggggtgacggcttctgtaaaagcgaaaattgaagctgttctcgacttggagtccaaaggtgtacaagtgaaggtattgtcagtcccgttagctgatgaagccgggctgagacaggaattgagtcagatcaaacagacgctcggacctatcggcggcgtgattcactgcgcgggtgtgaccgataaagagacgctcgcattcatcagaaaaaccgatgaagacatacagcgcgtgctcgagccgaaagtagaggggcttcaggcgttatacagtgtgctcagcgaagagccgctgaagtttttcgtcttgttctcttctgtgtcagctgcgataccggcgctttcggcaggacaggccgactatgccatggccaatgcgtatatggactattttgcagactcatacaaagagcagctgccgatcgtaagcattcagtggccgaactggaaagaaaccggaatgggcgaagtaacgaacaaagcttataaagagagcgggctatacagcatcacgaatgcagaaggattacagctccttgacggcatacttcttgaatcagcaaggggcccggtgctgccggccgttctgaatcctaagctgtggaagccggagcgattcctgcggcggagcaggcaggatcagccaatgagcccggctatggtaaaatcggcggaaaaaaccgctgataccgccgcagacaacgctcaattaacaaggaaaacagaagaatggctgaaagaattattttctgaagagctgcggattgaccaggatcagcttgagacagacgtattattccaagattacggagtggactccattatccttgctcagcttctgcagcggatcaatcggaatctctcggcatcgcttgacccgtccattctgtatgaatatccgacgattcaatctttcgcaaaatggcttctcgaagggtatacagaagttttgtcagaacggtttgatttggcggcggctgagcctgttatgaagaagccggctgagccggtaattgtaacacaagccgttaaggtgcaagaagaggcggccgaaaaacagattcaccgggaagatatcgcggtcgtcggcatgtcctgccggtttccgggggcggcttccttagaggcgtactggtcgcttttggctgaaggccgttcggctatcggtcctgttccggctgagcgatggggggtgaagacgccttattacgcgggaatgcttgatggaattcatcaatttgatccggacttctttttactggctgaagaagatgtaaaggcaatggaccctcaagctttggccgctctggaagaatgtcttaacctgtggtatcacgcgggctatacgccggatgagataaagggagaagcaataggtgtgtacctcgggggacgcagccgtcacagaccgggtgaagagaaactgctggatgcgaaaaacccgatcgtcgcgctgggccagaattatttggccgccaatctctctcaatattttgatatgcgcggcccgagtgttgtcctcgatacggcttgttcttctgctttagtcggaatgaatatggccgtgcaggctcttgtaacaggagaaataaaagcggccgtcgtcggcggtgtgagcctgtttgaatcagaagaaacccataaattatttgaacagcgcggcatattaagtaaagcgcagtcgttccatgtatttgacgaacgcgccgatggagtcgtgctgggcgagggtgtcggaatggttcttttaaaaaccgtgtctcaggccattgcagacggagattctatttatgccgtagtgaaggcggcatccgtcaataatgacggaagaacggcaggcccggctacgccgagtctggaagcgcaaaaatccgtcatgaagacggctcttgaaaaaagcggaaaacagccggaagacattactcatattgaagcgaacggttcaggcacggtcgtgacggatctgttagaactgaaggccattcaatccgtctaccgttcaaaagacgccggcccgctcggaatcggatctgtgaaaccgaacatcgggcacccgctttgcgcggaaggaattgcaagtttcataaaggttgttctcatgctgaaagaaaagagctttatcccgtttttatcaggtgagcatgaaaacacacattttgatagagaaaaggccaatattcagttcagccgcactctggcagactggccgtcaccaatgccggcggcaggaattaactgctttgccgacggtggaacaaatgcccacgtcattgtggaagcgtggcagggagacgaagggcgccgaatcaagcgccaccctttaacaccgcctgcattaaataagcggctgatttcgccggacagcaaagaagaaacgaacgaaaaagctgcggcaaacatctgggatacctatgaagtggaggtttaacgtgaagaacttcaataagcaaatcactttatcgctgaaaaatccgtttattttacatcatgacgtttacggacaaaaagtccttccgggattggcttatattgatatgttttatcagatttttaaagagcgcggctattcatacgacgggcttcagctgcgccatttatccatatatcagccgcttatcgcgaaagaagacagcgccgtcaagcttacggttgaatgtacaaaggtaaaagaagggcgctggaaacttaccgcaaaaggggctgaggtcagcggcggacgagtccagccggaagaacgtatttacgtcaaagcggaaatgcacgagacggcacccgcagttttcagtgacacgcttgatcttgactctgtcaaacgcgaggcggaacgcaccatcgatttaaatgagctgtatgcccaatgcagaagccaggaattggttcacagcggatatatgaaagcggaaggagaagtgtttgaggagcgggacggcgtcacctttgatgtatcgctcggaaaagacgcgatgggacaggccgaagggtttttgttccatccgactcttcttgacggaagcggcgtcggcgcaaacctattgatctcctcgctgttaaatggggaaaagaggctgtttctgcctcttttctacgaatcttttacagcttccgaacctttgcaggccggctgcatcacgagaatcaaacgttcgtcgcttcggcaggaaaaagagctcatttacattacactggagttttttaacacatccggccgaaaagtagccgagctgaaagatttcacaagcaagctcgtgcgggatgccgagctgatcaatacagaccgaaagactgctgagaagcctcctgaaaaagtcggtttaccggaagttgcggcatcgcttgaaggcggacacccgcatgaggaagcagaacggtatgtcatgaatctgatggctgaaaaaatcggcaagccgcttgaacagattgattctcaagtcggctactatgaaatggggctgacatcgtccggactgcttgacgtcgtcgaaacgatcagtgaaaaaatcggcgaaaccctttctccgactttgctgtttgaatatacgacggcatcagagctggcggctttcctgacagagcagtacggaagccatttcagcgcgtctcctgcaaaaatagagaagcaggttgagaagcaaacagaaagaagacggaaaagcagtgttccgcaagatgaagatatcgcgattatcggcatggccggccgctatccgcaggccgaaaatattcatgaattctgggaaaacctgaaagaaggaaaaaactgtgtcaccgaaattccggagtctcgctgggactggcgccggtttgaaaatgtaaagtcgccttccggaaagagcatttcaaaatggggcggatttattgatgatccggattgctttgatccccaatttttccggattacgccgcgggaagctgaaacaatggaccctcaggaacggctgtttttacaaacatgctgggaaacgattgaggatgccggatatacgccgaagtcgctcgcagaggcgcgcggacggaataagaggcagcgcgtcggtgtcttcgcaggggtgatgcataaggattatacgttggtcggggctgaagcttcttctgaagatcatgtattcccgctttctcttaattatgcgcaaatcgcaaacagagtttcatatttttgcaattttcacgggccgagcatggctgtcgatacggtctgttcatcctcgctgactgcggttcaccttgctgcggaaagcattcggcgcggggaatgtgaatcggcggttgccggaggggtcaacttgtcgctgcatccgaataaatatctgacatacggtttatgggacatgttttcaacagacggggtttgtcatacattcgggaaagacggagacggctatgtaccggctgaaggaatcggtgccgttttattaaaaccgctgcgagaggcggtaaaagacggagaccggatttatgcggtgataaagggcagtgccgtcaaccacgtggggacagtgagcggaatttccgtgccgagtcctgtcgcgcaggccgatttgattgaagaatgcctggacaaagcgggcatcgatccgcgcacggtcagttatattgaggcgcacgggacgggaacttctctcggcgatccgattgaggttcaaggccttgtcaaggcgttccgccagtacacacaggacaaacagttctgttcgatcggatcagtgaagtccaatatcggccatgcggaatcggcggcgggcatcagcggcttaagcaaggttgccctgcagcttcaccataaaactttggtgccgtctcttcattccgaggagctgaatccgtatttagattttgaacaatcaccgttttacgtccagcatcataccgaagcatggcagcagccatcagtgacggaaaacggaaacgagaccgtatatccccggcgtgcgggcatcagttctttcggggcgacaggttcaaacgtgcatctcattctggaggaatttatccctgaagaatcacggagaacagcgtatgaaccggcagaagaacagactttcattttcccggtttccgcccggaatgaagaacggctaaaagagtatgttgcgaagctgtcttcatttatttatcccggcctgccgcttgaggatgcggcgtatacacttcagatcggccgtgaacagatggaggagcgggttgcgttcaccgctcagaatatgacacagctcaaagagcggctggaaggctttctggcgggtaaaacggtcagcggatgctggcggaaccgagccgataaaagcaatcaggcagagcttgctccggacttgatacataaatggctttcttccgggagtctggagatgattgccgaaaagtggaccggcggaggaacgatggattggaatctcttgtacggtgaaaacaaaccgaatcggatcagcctgccgacatatccgtttgaaaaaatccggtattgggtgccgaaggcggagaaaagagaatcgctgccgcaaaaaagggcaggcatgctgcatccgctccttcatgaaaatgtatcaaacatgtcaggtgttcgtttccggtcctcttttagcggcggagaatttttcctgaaagatcacgtcgtcaaaaacgagcggacgttaccgggcgcggcttatctggaaatggtccgggcggccgttgaacacgcggcagaaacgaaggaagaaggaacagtccgtctgaaaaacgtcgtatggatacgtccgtttacagcggcggatgaatccgcagaactgtatctccgtctttatgatgaagaaaatggggagatgggcttcacggtttacggtgaatcggcttcctcggaacaagagcccgttctctatgcgcaaggaagcgcggcgtttgtccgagggggcgaaccggccaaaatcgagattgacaaattaagagagtcacgccgtctgatcacacctgacgcttgctatcaggcatacaaacagatggggattgaatacggggatgctcacaaagcggtcacggaaatctatgcaaaagacagcaaagtgctcgcgaagctctcactcccgtcatctatttctcatacaaaagatcagtttgtcctccatccgagccttttggatgcggctttccacgcgacaatcgggttaatgcttgacagagacggaaatgacataaggccgatgctgccgtttgctctcgaacagattgatgtgttgaaaagctgtaaaagcgatatgtgggtttccattgcgtacagcggcgaaagcaagccagaagatgccgtgcagaagctggatattgatgtatgtgacgaacaaggcaatgtatgtgtgaaaatgactggttattccgcacgggaaattgaaacggataaaacagatacactattttttgaacacgtatgggaagagaaggccgctgtacatgaaaaagcgccgactcatttcaaagcccgtcacgtgatgatatcagaccggtttacggatcaaatgaacagcatacagacagacttcagctgtcacgtgctccgtgatcagcataagagtgaagacgaacggtttgaagcttgtgcgcttcaggcgttcgaagaagtgaagaaaattctcgcttcaaattccggcgggcgcgagctcattcagattgtcgtgcctcaagaagcggatacgcagctcctttgcggcttaacggggcttttgaaaacagcggcgcttgaaaacccgaacctgaccggccagctgattgaattggagccggacgtcaaggcagacacgctgtcccgatatgtaaaagaatgcagcgctcatcctgatgacaaacatattcgctatgaaaacggcaagcgctatacggcacaatggcaggaaacagggcttgaacagttcggcgccgaaaagccgtggaaggataaaggtgtttatctgatcacaggcggtgcgggcggactcggatttttattcgccaaagaaatcgcccgacatgcaaaagacgccgtgcttattttaacggggcgttctctgttggataaccgtaaaaaagaccagctgcaagaactgtccgatctcggcgcgcaagccgtgtacaaacaaacggacatgacggaaaaacaagaagttcaatcgctcacagcggacatctgccgacagtacggcggattaaacggtatcatacacagcgcgggaacgataaaagacaattatattctgaaaaagcacaaaggtgaaatccgtgatgtgctggcgccgaaagtctccggactggttcatcttgatgaagcggcaaaggacattgagcttgattttctgattcttttctcttccggagccggaagcgccggaagcgcgggccaggctgattatgcgatggccaatgcgttcatgaacgccttcagtgaaaaaagaaaccgtaaaaaagcccgaaatgaacgctatggacacaccctttcaatctgctggccgctttggaaagacggcggcatgacggttgatgctgaaacggaagcgatgctgacaaaagaaagcggcatggtccctatgaaaacagaaaacggcatccatgctttgtaccgcgggtgggcggcaaacacatcccaaatcatggtgacggaaggctacgccgcaaaaatccgggcgtttctgaaaaaatcagcggatgatcagccggataagggcagcgaaacggaagaaccggcaggtcttacggcaggcggagagaacatgcttgcagaaaaaacggagcatttcttgaaacatgtgctttcggaagtaacaaaacttcctgtcggcaaaattgacgccaaggcgcctatggaagattacggaattgattcgattatgattatgcatttgacgggccggctggaaaagagcttcggttcattgtcaaaaacattgtttttcgaatatcagaatatcgaatcgctggcgcagtattttatgaaagcacaccgggacacgctgctggaagtgaccgggctgaaaacagaagaaacctctgcagccaaaccggcgctgtctgaaaaagccgaaataaagcccgtttccaaacggaatgaagccaaaaaaggctttgcgcaagtccgcacagacacgcggaaaaatccagtgacggagcgtgaagatatcgcgattatcggtatatcaggacgatatccgcaagccgaaaatcttcaggaattttggaagaacttgagtgaaggcactgactgcataactgaaattccaaacgatcgctgggatcacagtctttattacgacgctgataaagataaagaaggcaagacgtacggaaaatggggaggatttttgaaagacgtggacaaatttgatccgcaattcttctctatttcgcctcgggatgcaaaattgatggacccgcaggagcggttattcctgcaatgtgtctacgaaacgatggaagatgccggttacacgcgcaaaaagctcacggaaaaatcgggtgatttgcttggcgccaatgtcggtgtttacgtaggcgtcatgtatgaggaatatcagctttacggagccgaagaacaggcgcgcggaaaatcgcttgcgctgaccggaaatccgtcatcaattgcgaacagggcttcctatgtattcggttttaacggtccgagcatggcgctggatacgatgtgctcttcttctttaacagccattcatctggcatgccaaagcttgcggaacggggaatgcgagacagcatttgccgggggcgtcaatgtatccgttcatccgaataaatatttgatgctcggccagaacagatttttatcaagcaaaggcagatgtgaaagtttcggtgaaggcggggacggttatgtgcccggtgaaggagtgggagcggtactccttaagccgctttctaaagcgaaagcggacggtgatcatatttacggcctgatcaaaggaacggccgtaaaccatgatggaaaaacaaacgggtattccgtaccgaatccgaacgcccaagccgcggtgatcaaacaggcgttaaaagacgcgggaaccgatccgagggcagtcagctacatcgaagcccacggcaccgggacttcactcggtgatccgattgaaatcacgggtctgacaaaagccttttcagaacaaacacaagataaacagttttgtgccatcggctcagcaaaatccaatatcgggcactgtgaaagcgcggcgggcatcgcgggtctgacgaaggtgctcctgcaaatgaaacataagaagctcgcaccgtcactgcattcccggacgcttaacccgaatattgattttctcgctacgccgtttatagtgcagcagacgcttgaagagtggaaaagaccggtcataaatgaaaacggaataaataaagaactgccgagaaccgcggggctttcctcattcggagccgggggcgtcaacgctcatatcgtcatcgaagaatataccgctgatgaggataaggagacggcttttgccgctcctcatccatcgatgatcgtcctttccgcgaaaaatgaacaaaggcttcaaaaacgggcggaacgtcttcttgatgcgctgcggagcgggcgttaccaagaagcggatctgagccggatcgcatatacgcttcaaatcggacgtgaaccgatggaagagcgtctcggaatgattgtcagcaatttgcgcgagcttgaagaaaagcttgacgaatttacgggcggcaaggagtcaattgaccggctctaccgcggacaagtcaaacagaataaagacacgatggcgctgtttgcggctgatgaggacatggaaaaaaccattgaggcatggcttgaaaaaggcaaagccgcaaaggtattagagctttgggtgaagggccttccgctgaattgggataagctgtatcaaatgggcagaccgcaaaaaatcagtctcccggcctacccgtttgcaaaagaccgttattggatcgacacatcagctgatgcagctgtcaaaagaccggccgaaacacagtctgcgccgatcgcaccggcggccgtcccggaaccggtcattgaagtagcaactcttcacgaggagactgccaaagaaaaaccgtcaaacatttcattgcagcctttgagcggcgcgaaaccgaaaagaaccgtacagtctgcttcccgtccggcggtatccgctgaaaaagtaagtgccgaattaacggaaaggttggcggacgtgttatatatggatgccgacgatatcgacgcagatgacacatttattgatatcggcatggattcaatcacaggtcttgaatggataaaggccgttaataaagcgtacggcacgtcccttacggtgacgaaagtatatgattatccgacaatccgccagtttgcggccttcttgcaaaaagaactcgggacagaaccgatccttgaggaagcagccgaaccgcagaaaacagaggccgtaaaaaaaccgtcaaacatactgctgcagcctttaaacgctcataagcagcatgtgatacaagcagaagcggatattctggaggcgatgtctgaaacggcagcttccgccgaaccggaagaaccgattgaagcggtgcatgacgagttatcaaaagcactggctgatgtattgtacatggagcggcatgaagtggatattgatgaggcctttattgacctcggtatggattcgattaccggtcttgaatggataaaggccgtcaataaacggtacggcacggactgtaacgtaacgaaagtgtatgattatccgacaatccgtcaatttgccgattttctgcgtacgcagccgtccgtccgcggcagaaaaaaacaggcggttcccgtacgtccaaagccgcttacacagcaagccgccccgcaggagaaaacacctgccgagccggagagattaacggttcaaaaggaacctgaaccggtgcaggccaaacgggagcctaaagacgagatagcggacgcgatagccatagttggcatgtcgggcaagtacccggatgcgccggacctaaaggcatattgggacaacttagcccgtgcgaaaaacgctatccgcgacatcccgctttcccgctgggatgtaaacaaatactatgatccggccttaaacaagaagggcaaagtatactgcagatcaatcggtatgcttgacggcattgaagagtttgatccgctgttctttaatatttctccgtctgaagcggaacttatggacccgcagcaccggatatttttacaggaaggttttaaagcctttgaagatgcgggttacagctcaaaagaattaaacggaaaaaattgcggcgtttatttggggattatgaacaatgaatacggaatgatgttaaacaaacatcagacaggaggaagcgcgacgggcaacagtttcagcatcgcggcggcccgcctgccttattatctcaatttgaaagggccggccattccgatcgatacggcatgctcttcatctctcgtcgggactcatttggcgcgtcaggcgctgttgaatcatgaaattgacatggcccttgtcggcggcgtcaccttgtatttaacgcctgaatcatacatcagcatgtgtgaagccggaatgctgtctcctgacggccaatgtaaagcatttgataacagtgcgaacggatttgtgcctggcgaaggcgcgggggcgctcgttttgaagaggctgaaagatgcggaagccgatcaagaccatatttacggagtcattatcggatctggaattaaccaagacggaaaaaccaacggcattaccgcaccaagcgcgaaaagccaaatggatttagagcgtcaagtgtatgaagcgcacaacatccaccctgagagcatcacctatgcggaaatgcacggcaccggcacaaagcaggggatccgattgaattagaagccttatcttctgtattcaaggaaaaaacggaccgcaaacaattttgcgccatcggttcggttaaatcgaatatcgggcatacgtcggcggcggcaggtgtagcaagcgtacagaaggttctgctgtcgatgaagcaccagcagcttgtgccgacccttcatttcagcacgccgaatgaacattttgatttcgatgactcgcctttatttgtcaataccgaacttaaaccttgggaaacaggcggagcaccgcggcgggcctgcgtcagctcattcggctacagcggcacaaacgctcatctcgttatcgaagagtatcagccgaaagaccggggaagccgcaagtctgatgagacaaacatttttgtgctgtcggcgaaaaaagcgccgcaggtaaaaacctatgctgagtctgtgatcgaatttgcaaaagccaatcagaatatcaatctttcggatatggcatacacgcttcagaccgggcgtgatgcgatggattaccgtcttgcggttacagccggttcgagagaagaactgatcagccgtttaaccgattttgtaaacggaaatacgggtgaagggatatatgaagcccacatcaaaacggcaaaaaaagaaatcaaagcatttgaaacggacgatgatctgaagcagcttgtcaggtcgtggttcgataagaaaaaatacgccaaaatagcggaattgtgggccaaagggcttcagacggactgggacagactctatcaaggcgaaaaaccccgcagaatcagtctgccggcttacccatttgcgaaggagccgtactggctgcctgagccgaaagccgtaccgcaggaaacagaagaccggcgcaaggctgtgcttttagaaaagcaatgggttccgtgtgagatcgattcggccggtgagaaaagcggcaggacggtcatgattctggctgatgcaagaacagcggaacttgccgaagagactgcgaagcatttcgctgactcgttcattctcccggccgctgacactgcagctagcgattggaatcacatagatggcgtaatcgatctgacgggatgcggagacgaagacccttcactggaagggatcagccggctccagactctgattgatacaagccgccggcaagcgcggccgctgacgctgctatatgtaacaaaaggcttggagccatttcagcagaaaacgattcatcttgcaggagcggcaaaaagcggcctgtacagaatgcttcaaaatgagtatcaaaacgtgacgtccagacacatggataccgatacagatacggatcagcagacgcttgccaaacagattgcagatgaattttcggcggacagcacagaaccggaagtctgccgccgaaacggacaaagataccgtgctttgttcagcgagattccaagcgggaagcgagcagaacataagccagcaccgtttcctgaagaccatgtgcttttcattaccggagggacgaggggactgggtctcttatgcgcccgccatttcacagaaaaacacggcgtgaaaaaagtagtgctgacaggcagggagccgattcctccccgtcataaacggacagccgttaatatgaggctgagagagaagatacgggcgattgaagagcttgaagcaaaaggagtgcaagtggcggtgatcagtctgaaattgtctgatcatgacgcggcggcagcggaaattgaaacgatccggcgcacgatgggaccgatcggcggcgtcattcactgtgcgggatcggttaattcagtaaatccggcgtttatcagaaagactgccgacgacatacaagaagtgcttgaaccgaaagtcgccgggcttcaaacattaagcagccttttcacaaatgatcctttgcaattttttgtcttattttcttcagtatctgcagtcgttccggcactcgcggcgggacagtcggattatgcgatggcaaatgcgtacatggattatttcgcggcggctcatcagcatcaatatccgttagtcagcattcaatggccgaactggaaggaaaccggattgggtgaaatccgcacagaaaacctgaagcagaccgggctgctgggactgtccaacgcggaaggacttgacttgctggaccgcattttatctgaaaacatccgcccgtccgttctgccggctatcgttgatcggagcgaatggcatcccgacaggctgctctgtcaagagaaaaaacaaaaagagactgaagccgtaataaacggcaaagacgcggaaaaacattcagacagagaactgcttcttgatacgaaggcatggcttgtgaaactgttttccgatgagctgaaaatcgctccggaagatctggaaacagacgaaccgtttcaggattacggggttgattcgatcattttagcgcagcttttacagcaaatgaatcaagcgctcaaagaggacttagatccgtctgttttatatgaacatccgacgattgacgcgtttgccgaatggcttgtatccaatgggcagccgctgcttgcagaaagggaggaacctgatacggaaatgttggttccggctgccgtacaaacggttcacactgagcaaaagcgtgctgctgtaactgaagacattgccgtcgtcggaatgagctgccgttttccgggagcggaatcgttagaacaatattgggacttgctgagaagcggcaggtccgcaatcggctccgtcccggcggaacgtttcggatatgcaaatcaatatgttgcgggattgattgacaatatggatcactttgattccgaattctttttcattccggaaaacgacgcgaaagcgatggaccctcaggcgttggcggtgctggaagagagcttgaaactttggtgccatgccggctatacccgtgaagaaatcaagggcatagaagccggtgtgtatatcggaggccgcagccagcatcagcctgatcctgaaagtcttgcgaatacccgcaacccgattgttgcgggcgggcagaattatttagcggcaaacgtttcgcaattttttgatctgcgcgggccgagtatcgtgcttgatacggcttgttcatcagctttgacaggaatgaacatggccgttcaggcactgagaagcggcgatatcaaagcggcggtagttggcggcgtcagcctgctgaacacggatgcggcgcaccggatgttccaagagcgcgggctgttaaacgagaaaccggcatttcacgtatttgacaagcgttcaggcggagtggtcctcggtgaaggcgtcggcatggtgctgttaaaaacagtaagccaggcgcaaaaagacggcgatacgatacacgcggtcattaaggctgccgccatgaacaatgacggcagaacggcaggcccgtcagccccgaatatgcaggcgcaaaaagacgttatgcaaagcgcgcttctcaaaagcggcaaaaagccggaagacatcacttatatcgaagcaaacggatcgggttccgcggtgactgatttgcttgagctgaaggcgattcaatccgtataccgctcaggtcagcatgttccgctcggcatcgggtcaatcaagccgaacatcgggcatccgctttgcgcagaaggcattgcaagcttcattaaagtcgtattaatgctgaagcataaacaaacggttccgtttctctcaggagacgaaccgatgccgcattttgatataacaaagacagattttcactttcataaaacagccggcgaatgggatgcagccagaccgtcagcagccatcaactgctttgccgacggcggaacgaacgcccacgtcattctggaagcttgggaagaaaaagatacccgaatgaaaagaaagccgctgccggtaccgtcattaagacgtaaggctctggtaaaagaacctgacgtacgagcggagaaacaagagcttcctgcgaaaaaaatgttttggaaagcatttaaataagagaggagtgggaaggaatgatatcggaaaaaatcaatatctcactggatcatcccatcatgaagggccatatggtctttggtgaagcggtattgcccggtcttgcttatatcgatttgatttatcaggtttttcaggaacacggttatgtatacaatgagcttgaattgaagcacgttacgatttatcagcctttaaccgtcagtgaaacggctgcaatcattctgaccattcaatgttctgatagcggagatggaaagtggctcatctccctttcagggcagaaacagcaaggtgacgagctgtcagacaatatacaatatgcgacggctgaaatggtgaaaagagacgctgtcacatttgacgaaatcattgatttcagcgatgtgaagcagtcagccaggtctctgaatcttgatgatatgtataaccgctgtctggatcatgacttggttcattccggcatgatgaaatcaaatggacaattgtacgaaacagaaagcggcatgctggctgagctttcttgcgaagaaggaaaagatttctttttattccatccggcccttttggatgcgagcggaatcggggggagcggtttgctttcagaaacaaaccggcttcacctgcctttatattatgaatcgttcacggccgctgacaggcttcaatcagagtgcacggcgcgtatcgccgcttccggcgtccgtcaggaaaaagaactcacaacgatgacgatcgagtacttcagccgatccggacaaaaggtggcggagcttaaaaacattacgggaaaagcggttcggctcgaagacgcgaatacagccgaacagaatcaacaggctgcagctgagccggaaagcgcagatgaaaaagacatcattctgtttttaaagaagcttttggctgataagcttgggcaaccttgggagacgctggacgttcttgcaggctactacgagcttggactgaattcatcttctttgcttgagattgtacaggatatcagtaaaaagacgggtgctgacctcgcgcccactcttctctttgaatatacaaatataaaagaactcgcagcctttctgaaaaagactggttcatttgaatatgcggaggaacgtgcagccgaatcatcacgatctgaagctgaagcgccggacgcgccagaacatcataaaaacaccggagacatcgcgattatcggaatggccggccgctatccgaaagcgaaaagtgtggcggagttttgggaaaaccttaaggcaggcaccgattgcatcactgaagttccgaagtcccgatgggattggaaaacatatcaaaacgtaacgtccccgtctggaaaaacagtatcaaaatggggcggtttcattgacgatgccgactgtttcgatccgcagtttttcagaatctcaccgcgtgaggcggaaacgatggatccgcaggagcgcctgtttttagaaacatgctgggaaacgattgaagatgcggggtatacgcctgaaacgctggggaataaaggggagaaacagcatccgatcggcgtatttgcaggggtgatgcataaagattattccttaatcggcgcagaacaattatctgaagctgatccttttccggtttcactgaattatgcgcagatcgccaacagagtgtcctattattgtgacttccacgggccgagcatcgcggtggataccgtttgttcctcatcattgaccgccgttcatctggccattgaaagcatccgccgcggcgaatgtgaagccgcgcttgcgggaggggtgaacttgtcgctgcacccggcgaaatatctcagctacggaagcgtagggatgcactcaagtgacggccgctgccgcacattcggcgagggcggggacggctacgtttccggagaaggagtcggtgcggtcttgctcaagccgctggaaaaagccgaacaagacggcgaccgcatttacgcggtcattaaaggaagcgccgttaaccacgtcgggaaagtaagcggaattaccgtcccgagtcctgctgcacaggcagaagtcattaaggcctgtctgaaaaaagcaggtatcagcccgcggaccgtcagttatgtggaagcccatggcacgggtacttcgttaggagacccgattgaaattgaaggtctgtcaaaagcgttcagccaagggacgcaggatcagcaattttgttccatcggttcggtcaaatcaaatatcggtcacgcagaatcagcggcggggatcagcgggttaacaaaagcggcgctgcagcttcatcacaaaacgcttgtcaaatcactgcattctgcggaattaaatccttacctgaaatttgagggatctcctttttacgtacagcagcagactgctccgtggaagcagccggcagccgaagaaaacggaaaagtcacacattatccgcgccgggccggactcagttccttcggtgcatcaggttcgaacgcccatatcattttagaagaatacattcagcctgaacaaaaagcgcctgcacctgagaacaatgcagcaaaactcatcccgctgtcagcaagaaataaagacaggcttctggcctatgcggaaaaactagcccgatcgctttcagaaaagacggtgctgtctgaactggcttatacacttcagacaggacgtgaagcaatggaagagagagctgtcttccttgtaaatgacatccgcgacttgaaagaaaagctgaatgatttcgtaaaaggaaacgaaaacatccccggtctttggcgcggacaagccgagctgccggaactgagcgaaaccgctcccgagacggatgatccgatacggcttgccgagttatgggcagaagggaaaataatagattggaataggctgtacgcttcgggtaaaccgcgtaaaacaagcgttccgacgtatccgtttgcaaaagaacgctattggattccgcagcagaaaaaacaggagaaaagcccgtcaggcacagtgctgcatccgcttttacaagaaaacacgtcagatttttcgcagcagcgcttcacgtctctttttactggagatgaatttttcctatctgaccatgtcgtcaacggacaaaaaatactgccgggcgttgcctatttggaaatggccagagaggcggttaaaaaggctgctgccgtgacggaaaaagaccatagcgtcacactcaggcaggttgtttgggtccggccggtcatgattgaagacaaaccgaaggaaatacatattgccctttacccagaagataatggtgagattacctatgaaatatacagtgaggcagaaaacggcgaagatccggttattcacagccagggtgaagcggtcattaccgaaccggaaagcgcccagattgatatcgagtctgtcaaagcttcctgcaattcagggaccgtgactgcggaagaatgttacggtgcttttgagaagatcggtctggattacggagaggcatacagaggcgtacagcaattgctgatcggagaagaccgattattggcccgtatttcactcccggctgccgtacatgacaataaagaacagtatacgcttcacccgagtatgatggacgccgcttttcacgcctccgtcggtctgcttgtccgctcaatacatgacgatgcagacagccacgagctttctctgccgtttgcgatgcaggaagtggaagtgttcgggccgtgtcctgaacatatctggtcatatatccggtacacagaaggcagcaaagcagatgacaacgtaagaaaatttgacattgatatgtgcgatgatgccggtacggtttatgtccggatgaaaggcgcgtccgtccgggcgcttgacacaggccaaacagcgggcggagaaaccccggaagcgcctgtcggccatacgatgctgattccggcatgggagcccgttgcacttgaaaaaacgaagaaagcaaaaacagcggaaaagcagactgcggttttcggtgaaactgacagaacgcatacgcgcataaaagaacatctgccgaacgcttcctattatccgatcagaggtacggatgatatcacatctcttacgtacatgcttgaaggacaaaaagagctggagcaaatcatttggcttgctccgcaggctgagagtgcttgcagcctcaaggaacaggaaagaaacgttcttcatgtgttcaagctgatgaaagcattacttgccttggggtacggagaaaaacatttggactggtgcatcgtcacagcaaatgcccagccgttttccgatcaagacagcgccgccccgtcacaggccgcagtcagcggacttgccggaacaatggcgaaagaatatccgcattggaatatccgcatgattgacacggaaacggacggcagctggccggtcaaagaggcgctcagtctttctgccggaaaaaacggtcaaatttgggcgtaccgcaatcagcagctgtttgagcggcagctgataccgcttgacaatatgccgaaaaacggcacgctgtaccaaacaggcggggtttatgccgtgatcggaggcgccggatatcttggcgaggcatggagtgaatacatgatccgccgctacaaagcacatatcatttggatcggaagaagcacactgaatgattccatacaggcgaaactcgaccggctcagcgcattcggcccggcgcctgaatatgtttccgccgatgccgctgacagtgcttccttagagcgggcttatcagttcataaaagagcgtcacacaaaaatgaacggaatcatccactcggcaatggatctgtctgagcaaagcttaaataatatgaagacagaagagttcaaatcggtgctgcgggcaaaagccgatgtcagtgtgtccatggcggaggtatttggacgggagccgcttgactttgcgctcttcttctcctcgcttgtggcatttatccataacgtgaaacaaagccactatgccgcaggatgcgctttcagtgacgcatttgcgaaagaacttgatcagacgtggaattgtccggtcaaagtcatgaattggggctattggggcaacagcgaagcggctgaagacggcgattttattcagctgatggatcagatcggattgggattgatcgaaccggacgctgcgatggaggcgcttgaaacccttatgacgctgccggttgatcaagcagctttcattcatacgacaaaaccggtcgcagtcgaagggatgagtgaaacagaaaaaatttccgtttatccgtctcagccgcttgtctcttcacaacagctgaaggccgctccgcccggcgcacgtcttgtaaaagaggctgaacatcaaaagctcgatgattttctgtatcggcttttgatcgcccagcttaaagaagcagacttgctgacgccgcaaagccttaaagcgtatgagcccgaacacgaatattttaaaaaatggctcaatcaaacgatcgctttccttctggaacatggttatctggaagggaatgcggattcatataaactgtcggcccgtgccgaagacacaaccgcctcgctatggcaaaaatgggagcaggaaaaagaggaatggctcaataacgccgatacaaaagcgatgactgttttagccgagacgatgcttaaagcactgccggacattctgcgcgaagacgtgccggcgactgacatcatgttcccgcactcttcaatggaacttgttgaaggaatttataagcacaatcaagtcgcggattactttaacagcgccctgtcagaaacattaacggcttatgtgaaagaaaacatcagcaaacattcaaaagccgagatccgcatactggaaatcggagcgggcacaggcggcacaagcgcaggcatatttgaaaagcttaggccgtatcaaaaccatataaaagaatactgttacaccgatgtatcgaaagcttttctcgtgcatgcggagacggaatacggcaaacggaatccttatctgacgtataagctttttaacgcagaagcgccgcttgccggccaggacatagagccgggcgcatacgacatcgtcgttgccgccaatgtgctccacgcgacgaaagacatccgccagacgctgagaaacgctaaagccgtcttaaaagacaacggtttgctgctcttaaatgaaatggcgggaaacagcctgttcccgcatattactttcggactgcttgaaggctggtggctgcatgaagattctgcccttcgtattccggggtgcccgggcttgtatccggaaagctggaagcgcgtgttagaaagtgaaggctggcattctgtcttcttcccggcagaagcggcacatgaattaagccatcagattatagcggcaaaaagcaacggcgttgtccgccaaaaaacgcttaaagcaggggccggaaaacggaccgctccgccaaaagcagcacaagcgccggaatttaaagcgccgcaaacaacggtgcaaaaaggcgacacgtctttaacagaaaaaagcaccgagtacttgaaaacgttaatcggagaaacgttaaaaattccgccggctcaaattgatccgaaagcgccgcttgaaaaatacggaattgattctatcgtcgtcgtacagctgacaaacgcgttacgaaatgtattggaccaagtcagcagcactttattttttgaatatcagacgatcgaagcgctcgtcgctcacttaatcaaaacgaaaaaagacgcgatgatcaaactgacgggacaaacgcctgttcaggaagaacggaaggcatcaccagaaccgcaggctgtacagccggccaagccgcttcgcactgactggcggcggagggaaaagcgggcagccagagagaccgtccggcaaagttcggttcgcgacgtggccatcatcggtgtttcaggacgctacccgcaggcaaaaacagcggctgagctttgggccaatattaaaaaaggaaaaaactgcatagaagaaattccgcaggaacgctggaactggcaggattactacgatgaagagaaaggtaaagaaggctctatttatacgaaatggggcggcttcattgaggatatggacaagtttgatccgctgttctttcagatttctcctttggaagcggagcgaatggacccgcaggagcgattatttctagaaacggcgtatgcgagtatcgaggatgccggctatacgcctgacaacctgtgccaaagcagaaaaattggtgtttttgccggcgcgatgaacaaaaactacccgacaggctacggctactggtccattgccaacagggtatcttacctttttgatttccaagggccgagcattgccgttgatacagcctgctcctcttctttgacagccattcatctggcgcttgagagcatatacagcggttcaagcgaatgcgcgattgccgggggcgtaaacatagtgaccgacccgattcattatatgaatctgtcagtcatgaacatgctttccgcaagcgacacgtgcaaatcgttcggagaccgcgcggacggttttgtagacggagaaggggtgggcgcggtcgtattaaagccgttggagcaagcgattgccgacaacgatcacatttacggtgtgattaaaggaagcgccattaacagcggaggcaaaacgaacggatacaccgttccgaatccgaatgcgcaggccgccttaataaaagaagctttcgaaagggcaaacgtcccggcgcgcaccgtcagttatattgaagcccacggcacggggaccgcattaggggatccgattgaaatcgccggattaacgaaagcatttgatgaggatacaacagacaaacagttttgcgccatcggctcagcaaaatcaaatatcggccattgcgaaagcgcagcgggcattgcgggtctgacaaaaatattattccagctcaaagaccgccaaattgcgccgtccctgcacgcggaacagctgaacccaaatattgatttcgcgtatacgccgtttgccgttcagcaggagctcggtgagtggaaacgtcccgtcatcggcggcaaagagcttccgagaagggcggggttaagcagcttcggcgcgggaggagcaaacgcccacctcatcatagaagaatatacggcagacaaagagcctgatgagacgccggcagatcagcccgccatcatcgtcctgtccgcgaaaaacagcgaacggctcactgaaaaagcaaaacagctcagagacgccatccgtgaaaaaagatacagcggccgcgatcttatgagcatagcctttactctccagactggccgggtgccgatggaagagcgtctcggttttatcgtccattcacttcatgaacttgaggaaaaactgaacggatttatcgccggacaaaacagcgccggactgcaccgtgacggcacggaagaaaacaaacggatgcttgccgtatttgcggccgatgatgacatggaaaccatcatagacgcttggatcagcaaacggaaatattctaagctgcttgagctttgggtaaaaggattggacatcaattgggcgaaattatacggagaccgtcctccggcccgcatcagcctgcctgcttatccgtttgcgaaagaacgcttctggcatcagcagcctgtacaaagcaaggccgcgcccgttaaggcgccggctgatgaaagtgatccggcggagcagtttgaagtaatggcttttagagaagttcttaaagaacaggctctgccggctgccggagaaaagcaagtcaaaacggtgatttctttcttaactgatcagaagaagcagcaggaagccgtctctgtgatcaaatcgtatgacagtgacattgacgttatttttatcgctcagggagaccggtatgaggccttgtccgccggccgctgccaagtggtgcgggaagatccgcaatcatatgtgaacgcttttgcggatattcaaaaagagtacggtgaagcttctgccattttgtatttatgggcgcttgaagataaaagctgcatcgaagattattcatgtattgtccatattctcaaagcaatggctgagaccggtctgcagccggaaaggctgttattggcgggggaatatgcatccggtctggaaaggtgctacttggaatcatggatcggctttgagcgttcgctcggcattgttcttccgaaaacaagtgttaccggccacttccgaaaagccggcgcggccataacggactggatgagaaccatttgggacgagctgaaagctgaaacagaccataccgttttcttggaagagggaaaacgatatgtctatcacaccgaaccaaccggactaacgaaagaaaacggcaggatcagaaccggcggaacatatctcattacaggcggattaggagggctcggctacttatttgcccgccatctcgcccggaactaccaggcaaatgtcattctcacggggcggtcgccgatcaatgaagaaaagaaagaaaaaatgaaagacctggaaaatctcggcgcgggtgttctttacgccgaagccgatgtttgtgatccgatcggaatgggcgactgcatcaagcgcgcgaaagaacgattcggagctattcacggcgtcattcatgcggcgggcatcgaaagcagaacatccgtctttgaaaatgaaatcaggaatttccgcagtacgcttgaaccgaaaataaacgggagcctgcttcttgacgagtggctgaaaaacgaaacgcctgatttcatctgctacttttcatccacatctgctgttttaggagattttggatgctgtgattacgcggtcgcgaacaggttccaaatggcgtatgcccgctataaaaacgaacaatccgaaagcggaaacgcttttgtcataaactggccggtctggaaaaacggcggaatggccgtcggcggtgaagagacgacgggcatgtacctgcaatcaagcggacagcgcctgttagaaacagatgaaggcattgagctgtttgagcgcatcatttctcaagacaacacccagtgccttgtcattgccggcaaaagaagccgcgccgaacgatttttaggcatacggcgggacgattcatcaaaaccggatgcgcttttggaaaccgtgagccgccgcatcccggaagaaagcacggaaaaacggctcgaagcggatttgaaagagctgatacacagtctgctgaaaatatctaaagataaactcgtcctgcataaaaactgggcggaattcggatttgattccatctatttagccaaatttgccgctcttttgtcgagtcattacggcattgaagtcactccggctttattttacagctatgccacgctcggagacgtcatcagctattacctgacagaacacaaagaaacgatcaaaacgttttaccgaacggaagaaactgaaacaaaagccgccgctccgggtaacaaggagtacacggatcaggagatcatcgccatgatgaaacaggtctctgaggggacattagattttaaaagagtgcaagacatcatagaagggagtaagacttatgaatcataaagaacttctcgatgcctacagatcaggaacgctcaccatcgctgaagtagaacaaaagcttcaggctttcaagcggacaactgcaaaacgtccgctttctgaaggccagaaaggtttgtggatgcttcagaaaatgtttccggagatgagcgcatataacattccgttatgctttcgttttcaaaagctggatatcgagacattcaaaaacgcccttttgtccgtgcagcgccagcaccctattttgaccagtgtgataaaagaggaaaacggccttccgtatcagatagaagatacggatcggcattttccgattgaagaaatggatctttctgaattaagcgggcgtgacgctctttcgtttattaaagaaaaagcaaaagaaccgttcgcgcttgaaaccgggccgctcctgcgtgttcatgtattccggcgggcgaagcgggagccgattgtgttaatcaccattcaccatattatttttgacggcgtctctcttatgacgtttatgtcggcgctgctggacgcttatgtaaaagcaagtgaaggcaaagaacctgtcatggttcagcaggccgcagattatcatgactttgtgaaatgggaaaaagagctgctggaaagcgaagcgggaaaaacgcatctctcttattggaaaaagcagctggaaggaccgctgccggtgcttgagcttccgtcggattatccgagatcatcggttcaaacttgcaaagggcaggcgtatcagcgcttgcttcctgatgaactgaaccggcagattaaagtgtgcgcccaaaaacataatgtcaatgaatccgttgtgtatctcgctattttcaaagggctgctctatcaatatacgaatcaggaagatgtcatcgtcggcatgccgacgatggggcgctctgaggctcaatttgaatctgtcatcggatactttattaatatgatcgcggtcagaagcagggagacgggcgccaaatcctttacggcgtttttgaaggagctgcagctgacactggcagaagggctggaccatgccgcgtatccgtttcccgcgcttgtcaaagaattgaagacggaacgctcgcctgcggtttcgcctgtttttcaaaccgcgtttttctatcaaaacttcttccggacagaaggagcggaaaagctggcggaactatatcaatcactcggcattgaaatgatagaagacattcatcaggaaggcgaatttgagcttgcgcttgaagtctataaaaaagaaacgggaaccgtcctgcaatttctgtacaacccggatgtctacagcccttctttcatcgaacggatggcggagcattatatgaaactggcagaaaaggtgctttctgatccggagatcgcttttgaagcctgttccggcctgctcaatcaaaaacgtgaagcaagccgatctcatcagccgaatgagcgctgcattcatgaagtgtttgcggaaaaagccggacgccaccctgacagagaagccgtcacatacggtgaaaacagtcttacatatcgcgaattagatgaacgaagcacggcgctcgccgtgtacctgcaagaaaagggcgtcacaccggaatgcccggtcggcatttgtacggagcgttcttttgagatggtcatcggcatcctcgccattttaaaagcgggaggcgcgtatgtgccgctggacccggcttttccaaacgaacggatggcgcacgtgttgactgacagcggcgtttcaatcgtattaacgcaagcaaatacgcgcggcatgattgaacagttggccgtcggcggtgtgagcacggtggaaattgaaaagagcggacgttctgtcagcggggcaaaactgacgccgcgttcaaaaccgcatcatctcgcttatattctatatacgtccggaagcacgggaaaaccgaaaggcgtcatggttgagcacagggccatcatgaatacgctgcagtttttggaagctgagtatccggtcgcgcaagaggatgcctatttgttaaaaacgaattacgtatttgacgtttcgatttctgaattattcggctggtttatcggaaacggacggcttgtcattttgccgcctggtgcagaaaaaaacccgcagctttgtatggaatacatccaaacccaccaggtcacgcatctgaattttgctcccgccgtgtttaatgtatttctggaaacggtaaagcggcatacggcatttacagaagacggccctgtgaaatatgtgatggtggccggtgaggcatttccgaaagatttagtaaaaaaggccgtttccatcttcaaacatgccagaattgaaaacatatacggcccgacggaaacatctatttatgccgcttactacagctgcggccaaaaggaaatcacaagcaggaatacgccgatcgggaaaccgattcaaaatacacggctttatattgtcgatgaaaagctcagccccgtccctgacggtgtggccggcgagctttgcgtggccggcgccggtctggccagaggctattacaatcagcctgagctgacggcggcatcatttattgataatccgtttagtgaaggagaaaagctttacaagacaggtgatttggccagatggctgcctgacggaaatatagaatatgctggccggattgacagtcaggtgaaaattcgcggcttccgcatcgaattgggagcgattgaaacgaaattgaacgaacatccggacattcttgatcaggcggttgttgttcaggaaaagaacggacataaaaagctgattgcttattatacggcccgctccggtcatacggcagatgaaaaagcgctccgcaaccatcttttatcgagtctgccggattatatggcgcctgcccattttatccgtctggatgcgctgccgttaacaccgagcggaaaagtgaaccgcaaagacctaaaacagcgcaaggtaattgttcaccggtctgaaaagacgggcagactgccgttatcagaagcggaagcgaaagtgaccgcaatatgggaagacctgctgaatacggcgggcatcaaaaccgaagacggctttttcgatgtgggaggcgactcgcttttggctgttgcggcggcagaacgcattaaacaggagctggaatgcgattttaccgtcacggatttattcgaacactctaccattcaggcgatcagccgatttattgttgaaactaaacaggcggctgaatcagaggcatcaggccaagatgagagagaaagagaacaaacaccgcaaaacggggtgccgtcttactttgacgacagtgtggcgatagtggggatttcctgccagttccccggcgcgaaaaatcatcatgagttttggaagcagttaagagaaggaaaggaaagcgtccggttctactcggaagaagaacttcgggaagccggcgtacctgaagatttgatcgaaaatcccgactatgtgccggcattatcgacgatagaaggaaaagatctctttgaccctgagttctttcacatttctccgaaagacgcagaatttatggatcctcagcttcggcttctgctgctacattcttggaaagccgtcgaggacgcgggatatgtatccaaagagattccgaagacaagcgtatatatgtcggcaagcaataattcgtatcggtcgcttttaccggaaaaaacgacagaaggccatgaatctcctgacggctatgtctcatgggtgttagcgcagagcggcacgattccgacgatggtttcccataagctcggattaaaagggccaagctatttcgttcattccaattgctcatcatcattagtcggtctttattcagcctataaaagcatcacgagcggagaatcggaatacgcgctcgtcggcggagcaacgctgcatgcagcgacaagcatcggctatgtgcaccaaaacggattgaatttttcaagcgacgggcatgtcaaggcatttgacgcttcagccgacggtatggcgggcggagaaggagctgccgtcattctgctgaaaaaggcgtcgcaagccgttcaggacggagatcacatatacgccatgctcagaggcatcggtctgaacaatgacggagcggataaagtcggtttttacgcaccgagtgtaaaaggtcagactgacgtcatccagcatgttttagacagcacgaatattcacccggagacgatttcctatatcgaagcgcacggcacaggaacgacattgggtgatccgattgaaatgtccgcgctgcagcaagtgtataaacgttacacggaccgggagcagtattgcggaatcggctccgtaaaaacgaatatcgggcatttggatacagcagcgggtctggccgggtgcatcaaagtcgccatgagtttatatcatcgggagctggcgcctaccattaattacacgtcaccgaatccgaatatcaaattcagcggttcgccgttttatgtggcggataagagaaaatcgcttccggagagagagacgccgcaccgggcagcgttaagctcattcggactcggaggaacaaacgcacacgccatttttgaacagtatgaaaacaaaacgatcagcggatcaaatgacggacagccgccttatatcgttccgctgtcagcgagaaataagcaacgtcttactgcctatgcaacttgtttatccggctttctggatgaagccgaaaacgatgtttccttgcatgatctggcatttacgtatcagaccggacgtgaagcgatggaagagagagccgtttttatcagtcatgatcgtcacgatctgaagcgtcagctgcaggatttcatcaacggcaatgaccaaaacatcttacggggcgaaaaagtgagaagcagagaagtgtcggctcaggagatggaagagcttgcggcatgtcagacacgtgatgaaaagctgaaagcacttgcggcgctctggattgaaggagcgcgtgttgattggggcttattgtatcaggattccgcgccgcgaagaatcagtgcgccgacctacccgttcgcagaggagcgcttctggccggaagaaactgtgaagcaaacagatgcgaagtttttgcatccgctggtacatcagaatacatccgtcttgcaggagcagcggttcagttcggaatttacgggaaaagagtattttattgccgagcatatcattaaaggaatggcgatcgtgccggctgccgtcacccttgagatggcacgggccgcggcggagaaaagcatcggcggggcaacagaggattctctcggcctgcgcttaaagaatatcgtatgggtccgcccggtgatagtcgatcaggacgctgtccgtgtccatatcggactttatgaagaaggggacggacagattcaatacagaatgtacggcggtaacgattctatcggtgaagaagctcctctttataatcagggcatcgctgaaatcatccggaaggaaccggaggaagcggcggatattgagcagctgaagcgccggtgcacgcagggaacaatcgaatctcaagcgttttacaaaggaatgatcggagctgattacgggcctggctataaaggtgtccagcttgtatacaaaggcgaagaccggctgcttgctaaattgaagcttcctgaatccctctcccatacgaaagctgattatatccttcatccgagtatgatggacggtgcgcttcaggccgccgaatatttgcaaaacgtgacgagagcgctgctggcagaaagcggggaaccattcaaagccgcattgccgtttgctttagaggagctggacgttctgaatccgtgcgctgatgatatgtgggtgcacgtcacattcagtgcgaacaataaagccggcgatcctatccaaaaagcagatattgatttatatgacaataacggctggctttgtgtgcggatgagaggtttctcaacgcggatcatggaagaaaacgcgggtgccggcgtttcggtcagccgtacggacacattgttcgctgaaccggtctggaaagagcagacggcaccggccgatcatgcgccttcgtatgaagagcatatcattttcctttgtgagtacgatgaagccgttaaacaagctgtcgaagcaaagcttgaacatgcacgcgtcattatcctggacgatcgtcccgcatctattgcagagcggtatcattcttatgcgggtcagctgtttggccatatcaaaaccataatgaaaagcaagccgaagggccgcgttctttttcaggctgttacgcggtcagcaggcttacagcaggtgttctcaggcattaccggcctcttcaaaaccgcatgtcttgaacattccaagctgatctgtcaaatgatcgaagtcgaggagaaagaaagtgctgaaggcatcgcggaaaaagcggcggaaaaccgtatgcatgccgaaagcgtccatgtgaaatatgaaaacggcaagcgcattgccgctgattgggaagagatggatatttctcaagcggagccggacattccgtggaaagacgaaggcgtttatctcattacaggaggtgccggaggtttaggtctgatttttgcaaaagagatcgcaaaccgtacaaaagacgccgtcatcatactaaccggccggtccgctctcggagaaaagcagaaagacatgctggaaacagtacgtgctgccggcgcttctgttttctacgagcagaccgatgtcacggacgaagcagaagtataccgattgatccgcaatatccgtaaacggcacggcaagctggacgggattgttcacagtgccggcattataaaagacaactacatggtgaagaagacggcagaggaattccaacacgttctcgctccgaaagtgaagggccttgtgtatcttgatgaagcgtcacaacatgagaaattagatgtctttattgtcttctcatccttatcaggtgtgcttggaagcgtcggccaggctgattatgcgtctgcaaatgtttttatggagatgtatgccgagtaccgccgttctttacaagccgcaggacaaagatacggaaagacgctttctgtcagctggccgttatggaaagaaggcggaatgcaggcaggaaagcagacggaagatatgctgatgcagcaggcgggaatcgcaccgctcagcacagatgccggcatcaaggctttatatcaaggcttgatgagcgggacagcccggatgacggtttttgaaggagatgtgaaacacatgaaagcaaaacggttccgcaaagagaatgatcatccggaagcagagatcggcgtacgtcatgacattgatgctgacagcctgcttgaaaaagtgaagcatctgttaaaacagcagacggcctcgctgttaaaagtaaacattgacaaaattgatcctcatgaagaaatgacaaaatacgggctggattctatctcgatgactgagtttacgaaccagttaaacaaaacgtaccggcttacgttaacgccgacgattttctttgatcatccgacaatccatgaatttgccgttcatttaatcagtgaatacgaagaggaatttgccggacggtttgcggtaaatacaaaaacgattcaatcggcaagaccggtaaaagagactcaaattacgcgcccggccgttaagcgacgccgcactctgcctgagacacttccgcagacagtgcagcgggaccaagggccggaaccgatcgcaatcgtaggcatcagcgggattttcccgatggcagaagacattgaagctttctggcagaacctgaaagaaggcaaagactgcatgaccgagattccgaaagaccgctgggactggcgggactattacggggatcccgcaaaagaagccaataaaacaaacgtcaaccaaggcgggtttattgacggaattgctgaatttgatccgttgtttttcgggatttcaccgcgggaagcggagcaaatggaccctcagcagcgcctcttgctgacgtatgcgtggaaagcgattgaagatgccggatatgcgtcaaagagtctctcaggcacaaagacaggtgtgtttatcgggaccggaaacaccggctacggttctcttttagccaatgccgatgcggcgattgaagggtcatccgcggcgaatacaagtccgtctgtcggaccgaaccgtgtcagctatacgctcaatctgcacgggccgagcgagccgattgataccgcctgctcaagctcactcgttgccatacaccatgccgtttcttcaattgaagaagggacgtgcgacatggctttggcgggaggaatcaatacgattgttcttccggatgtgtatatcagctttgacaaagcgggcgcgctgagtaaagaaggaagatgcaagacgttctccgatcaggctgacggttttgcccatggtgaaggagccgggctctttttcctcaaaaagctgaaagccgctgaggcggatggggaccatatttacggcgtcattaaaggaagcgcggtgaatcacggcggccgtgcggcatctttaacaacgcctaacccgaaacaacaggcggaagttattaaagccgcatataaaaaagcgggcattgatccgaaaacagtctcttatatcgaagcgcacggcaccggaacagaattgggggatcccgttgaaattaacggcctgaaacaagcgttcagctcgtttgcagacggaaaagagaaagcggccggctattgcggcttagggtcggtcaaaacgaatatcggccatttatcccttgccgcgggagcagcgggcattattaaaattttgctgcagatgaagcatcgcacattagtcaaaagtctccactgtgagacggtaaatccgtatattcagcttgaagacagcccgttttatctggtgcgggagacgatggaatggaagacgcagacggacgaacgcggaaacgaacagccgcgccgcgcgggcatcagctcattcggcatcggaggcgtaaatgcccacgtcgtcatcgaagaatacattccagaagacagagaggaagcagatgattctcatatcgacccatgtcttttcgttctgtccgccaaaaatgaaaaacgcctgaaagagcaggcaaaacagctgaaacgtgcgcttactgaaaaacggtacgatcattccagcctcgtttctatggcatatactctccaaatcggaagggacgccatggaagaacgcctggcggttattgccggatccgcagaagaactgcaggaaaaactgtcacagtttatcactggagataagcatgcggatttgtacagaggaagaatagacaaaggcacgctgcaaatgctgacggaagatgaagaaattcaagaagccgttgaaaaatggatggcacgcggcaaatacgcgaagctgcttgaattatgggtcaaagggctgaacgtcgattgggcgaagctgtatggagaccggccgcctaaacgcatgagcctgccgtcgtatccttttgcaaaagaccgctattgggcggcgaaacacaccggaaaacacgaaaaaacaagcactgtatctgccggaaaacaagacgcgcttcatccgcttctgcacagaaatacttcaaaccttgcagaacagcggttcagctcaatctatacaggagaagaattttaccttgcggatcatgttgtaaaaggcgtgccgattttaccgggtgtggcacatcttgaaatggcgcgcgcagcaatggaacaggcatctgaagttccggccggacaaggaagcgtccagcttaagaatacggtttgggtgcggccgattaccattgaagacgagccggttcatgtcaacatccgtctcattcccgaaacggcaaatgacgttcaattcgacatttactgcggccgggaaacagatcagccgtccgtttacagccaaggggcagtatcagtccgccctgacgcaaaggctccggtcattgatctccaaaaactgagatcacaatccgccgagacaccgttttctgcagatgaagtgtacgatatgtaccgcaaaatcggttttgattacggcccggctttccggggtgtcaaagcgatttatacaggtgatgatttcgtattgggcagactgtctcttgatgcggcttgtgcggacacggtacaggagtatgtcatgcatccgggcttaatggactctgcattgcaggcatcaagcatattaaccggaacaaatgatgaacaactgatgcttccgtttgcggttcaggagcttgaagtattcagcgcatgcgctgccgagatgtgggtttacgccagactttctgaagaccacaaagccggacatgttgaaaaacgcgatcttgatatttgtgatgaaaatggcaaggtttgcgtaaggctgaaaggtttgtcattcagaacggctgaaaaagaacctgagaaaaaagaaaaagctccggaaacgctcatgcttgagccggtatggacacgaagcgatgaaactgctgctcaaacggaaccggtttttgcccggcatatcgtaatgctttgtgacacagacgccggactaaaacaagcggttgaagccgcgggagctgaatgtattgaaatgacctccctgcacgggaaagcggcggcgcgcttccgtgattatacaggacggatattggagacgctgcaaaaactgctgaaggaagagacggaaggagacgtccttatccagacggttctctctaaaacagataagcatcagctgctctcagggatttcagctctgctaaaaacagccggcctggaacataaaaaactgaaaacccagctgattgaaatagaaccagcggaaaacggcagaatcacagacatcatcagagaaaataaaacaagggctgatgacagccatatcaaatataaaaacggcatccgatacagcgcagatgtcaaagaaacggccgtgtccggcggcaaaatacgcattccgtggaacgacggagggatttatctcattaccggaggagccgggggcctcggctttattttcgcgaaagaaatcgcccggaaagtcaaagagccgacgctggttttgacaggccgttccgcattaagcgagaatcagcggatgcagctgaaatcgcttgaatcactcggagcaaaagcggaatacaaacaggctgacgtaacaaacgctctaactgcggcagacctggtcaaaacaattgaaacggaatatggcggccttcacggcatcattcatagcgcgggtgtgatgaaagatcaatatatcgtaaagaaaacaaccgaagagttttacagtgtattggctcctaaaacggacggatttgtcaaccttgatgaagcaaccgagcatttagcgctggactttttcatcgttttctcatccatttccggtgtcaccgggaatgcgggacaggcggattatgcggcggcaaacgcatttatggacagctatgcggcataccgcaacgcgctggttacggcaatgtaccgccacggtcacacattgtcaatcaattggccgctttggaaagacggcggaatgcaagtcaatgaagaaatggcgaagctcaccgaaaaaagaaccggtgtaacgccgatgcgcactgaaaccggaatagaagctctttacaaagcatggagcacggggaaaacaagcgtgctcgttatagaaggaaaccgcgccgtaatgcgggaaaaactgcttcaaaagactcccgcatccgcttttgcaccgattaagaaaacggaagaaacacctgcgccgaaagacctgacggccaaacttcaggaattgctggcaaaagaagtttccgggcttctgaaaataaacattgaagaaatcgatatcgaattggagttcaatcaatacggatttgattccattacgctgacggaattcgccaacaagctgaatgacacttatcagcttgatctgacaccgaccgtattttttgaatatgcgacgattcaagccttggcgcatcatttagcagaagactatcaaacgcaatttgccggcagcacacagccgaaagaagaaaagaaaagcggtgtaacagatgatggcggcatcagactggcagggaacaaacgatttgcaaaaacagccgtacagcatgttcagactgcggctgaacataaaccggaaccgatcgccattgtcggcatgagcggagtgtttccgaaggccgcaaatattgatgagtattggcgcaatttagaagagggaaaagattgtataacagaggtgccggcggatcgctgggactggcaggagtattacggtgacccgcttaacgaagccaacaaaacaaatgtaaagtggggcggatttattgacggagttgcggaatttgatccgctgttcttcggaatttcaccgctggaagccgaacagatggatccccagcagcgcttgttaatgatgtatgcgtggaaggcgatagaagatgcgggatattccactaaaagcctttccggcacgaaaacaggcctgtatatcggcacgggaaataccgggtacggctcactgttttccgacctggatatcggcggtgcgtcagccgcaaatatgagtccgtcagcagggccgaaccgcgtcagctatatgctcaatctgcacgggccgagtgaaccgatcgacacggcttgttccagctcgctggtcgcgattcatcacgccgtatgcgccattgaaaacgggaactgcgagatggcgatcgccggcggcgtgaataccgtcgtcacaccgcaaggccacatcgcttatgataaagcgggtgcgctgagcaaagaagggaaatgcaaaacgttctccgacagggcggacggatttgccgtcagtgaaggtgccggaattctgtttttgaaaaagctgtcagaagcggaaaaatcaggcgatcatatttacggcgtcattaaaggcagcgcggtcaaccacggcggacgtgcgaactccttgacgacaccgaatccgaaagcccaggcggaagtcgtcagaacggcttatgacaaagcgggcattgatccgagaaccgtcacttatatagaagcgcacggaaccggaacggagcttggcgatccggtcgaaatcaacggcctgaaatccgcctttcaaaagctgtacgaaaaaacaggcgatcccgccgtttacgcgagtcactgcggtttgggatcggcaaaaaccaatatcggccacctgtcactggcagccggtgtcgcgggtgtgatcaaagtgctgatgcagatgaagcataaaacacttgcaaaaagcctccacagcgaggtcatcaacccgtatatcaaactgaaagacagtccgttttacatcgtacaggaaaaaagagaatggacagcattgaaagacgaaaacggcaatcatctgccgcgccgtgcgggaatcagttctttcggcatcggcggcgtaaacgcccatgtcgtcattgaagaatatatcccgaaggaagaaagaaaaacagctgttttcacacaccctcaaatctttgtgctgtcggccaaagaagaagaacgtctgcaggaacaggcgcagcagctggcgcaagcttcttttacggatgcggatcttgccgatgttgcttacacgcttcagcaggggcgtgatgcgatggaagaaagagcggccattatcgcttcctcggccgaagaactgcgggacaagctaaagagctgtgcgaaaggacgttatgacaaagcgggcatttataaaggaaaagcgggtaaaatcccgctgaaatccattatggcaggcgcaaacggcgaagcggatatcgaagagctgataagccgccgggagaatgacaagcttgcggaattatgggtgcagggcgcggatatcaaatgggacggcttatattctgatatcaagccccaacggatgagtcttcctgcttacccgtttgcgaaagagcggtactggatcacggacaaccggccgaaagcagaaaaaccgcaagctgtgccgacggcgcgggtgctgcacccgctgctacacgagaatgtatcggatttaacagagcagcggtaccgatccgaatttacgggacaagagacgattttcaccgatcatcttattaaaggcaagccggtcatgccgggcgtcgcctacttggaaatggccagggcggcggttgctcaggcagtcaaagggcaaaaggaagttccgtctgtcatccgtctgaaaaacatcgtttgggttcggccgatcgaagcggaaaaccgcccgattgaagcgcaaatcagcctgaacccgaggggaaacggtgaaatcgtgtatgacatttacacggattcacaaacagaagcaagcggcaggcagatacactgtcagggggctgccggcattctcggcgccggggaggctccgcaccgtgatataggcgcactgaaagctcaatgcggcctcagcatgctgacttctgaacagtgttacggcttattcaacaaaatcggcattgactacggtcccggacaacaaggaattcagcacattcatatcggaagcaatcaagcattagctgagctccgtctgccttccttcctcgaagaaacagcagatcaatacgttcttcacccgtgtatgcttgattcagctctgcaagcgacaatcggactgaagctgcatgcagatgataaccagctgtcactgccgttcgcccttgaggaactggacattttcagcccgtgcacgaccagcatgtgggcgtatgtcagctcccggggaacggatgaaaaaatacagcggctggacattgacttatgcgatgagacaggccgcgtctgtgtcaggattaaagggatttcttccagaatgatggaaggaccggcgccggaaacatcattaaatggagcaaaccttctggctccggtatgggatcttgcggaattccgtgaccaaagcccggcatataagacggaagaggttgtctttatcgcaggggatgaggaaagcgaggcttttcaattgcatcatccttctgcgaaacggcttcatatcaacccggaggatgaaatagaggctgttgcggctgaactgaaagcaagagggtctttcgggcatatcgtatggatcgctccttttcacagcgatggtgacatggtgaaagctcaagatgcgggcgtcatccagatgtacagagtgattaaagcgatgcttgctttaggatacggaagcaagcgaatcagcttgactgcagtcacaataaaaacacagtccgtacagccggcggacatcattgatccggctcatgcaggcattcacggtttgatcggttcgctcgcaaaagagtatccgaactggcaaacacggctgattgatgccggatgtccggaagatgtttcaaaggcggagctgttctcagcgccgtttgatgagcaaggcaatacatgggcgtaccgcaacaatcactggtacaaacagcgcctcatccctgtacagcagccggtgtcaagccggcccgcttaccaaaaaggcggcgtttatgtcgtcattggcggcgcggggggcatcggcgaagcatggagcgaatatgccgtgaaaacgtatcaggcgcgagtcgtttggatcggcagacgaaaacataacagcgccatccaggaaaaaatcgacagactcagccaattcgggccggcgccgatttatattgaagctgacgcggcaaacccggatgagctcacacgggcgtatgaaacgatcaaacgcacgcacccgcaaattaacggaatcatccattccgcaattgttttagaggatcagagcctggcgaatatgccggaaagccgtttgagaagcgtgctcgctgcaaaagtcaatgtcagcgtgaatatggccctcgtgttccaaaatgagccgctggactttgctttgttcttctcatccgttcaatcatttgcgcgagcggccggacaaagcaattatgctgccgggtgcagtttcaaagatgcctttgccgctcatttggctcaagttcggccgtattcggcggcagtgatgaattggagctactggggcagtgtcggaatcgtatcatctgccgaatatcaagaacggatgaaacaggcgggagtcggatcaattgaagcgccggaagcaatggcggcgcttgaacgattgctcggcggcccattgaatcagttcgtcatgatgaaacaggcggaagagccggaggaaaaaccggaagaaatgatagaagtataccctgaacatcacggctcggcgatgcaaaaactgcgaagctatcagcctaaagtaacaagacatgtacaacaattgagttaaggaggggacggctttgcaaaacactgaagatcttctttacaaactattggcaggccagctgaaatctgtcggattttttacggaaaacgaaacgcagcctgttatgcaggggttttacggcaggtggctggaagaaagcatctccatcttggtgcaaaaaggctttttgaaacagtctggcagtacgtatgtgttaacgggtccgatagagcgtgcggacgttctgtggcaagaatgggatgaaaagaaagctcctttactcaaggacagcagcaaacgggcgatgatcaccttagtggagaccgctctcagagctttgccggatattttatccggcagagtttctgccactgatgttctgtttcctgattcctcaatggaattggttgaaggaatctataaaaacaatgaaacggcagactactttaatgaggtgctcgctgacacattgacggctttcattgaagaacgcctgaaagaagacccgaacgcggaaatccggatattagagatcggagcggggacgggcgggacgagcgcggccgttttcaaaagattaaaagaggtcaaacatcatgtgaaagaatattgctacaccgatctgtcaaaggcctttttcatgcatgctgaaaaagaatacggtcccgacaatccgtatttgacttataagcggtttaatgtggaagagcccccggctttgcagggtatagaggcgggtgcatatgacgcggtaattgcggcaaatgtgcttcacgcgacaaaaaatattcggcggacacttcgcaatgccaaagcggtgcttaaaaagaatgggattttgctattaaatgagatcagcagccattcggtttattctcatctgacattcggtcttttggaaggctggtggctgtatgaagacgccaaactgcgtattcccggatgccctgggctgtatcctgaagcgtggcagtctgcgctggaaagcgagggatatcggtacgttacatttatggcggaatcgtcacatcacctcggccagcagatcgtggcagcagaaagcgacggcgtcatcaggcaaaagcagccggacgcgccggcggttgaagaaattgcggcttccaaagagccggctgatttcacagaaccgtctttctcagtcacagaccggacggtgcaattcataaaagaaacgttagccaagtccataaagcttgctcccgagcgcattcagccggaaaccagctttgaaaaatacggcatcgactccattttgcaggtgaattttatccgtgaactggaaacattgacgggcgagctgccgaaaacggtcttatttgaacacacgaatacgaaagaacttgccgagtatttgctggaaacttacccggataagctgcaacaggcattcggagccgatcaagcgcctcctgaaacggagcatccggaacctgcaatgaatgaaccggtgccgcttgtcacggaaacgcggcgatttatcactgaacaaaaagagccaaaagcgccaaagccggaaacagaaaccgtcaccgataatcgctcagatcgtgacgacattgccattatcggcatcagcggccgctatcccgagtctgaaaccctcgatgagctgtgggagcatttaaaagccggagacagctgtattacggaagctccggaaaacagatggaagtccggtcttctgaaaacgatggcaaaagaaacacgaaaagaagaacgcaaaacacggtacggcggatttctgcagcatattgacgcttttgaccatcacttgtttgacatccgggaagaccatgtgatggagatgacacctgagctccgtctaagccttgaaaccgtatgggaaacatttgaaaacggcggctactcgttagagagagtaaacgaatggcaggaatcagacagcggaatcggtgtatttatgggcagtatgtacaatcaatatttctggaatatcccgtcattggaaaaagctgcgctcagctctaacggaggggattggcatatcgccaaccgcatttcccactttttcaatttaacgggcccgagcatgggcgttacgaccgcatgctccagctcactgagcgccattcatctcgcctgtgaaagcctgaagcttaacagctgttccatggcgattgccggggggtcaatctcacgcttgaaccgtctaaatatgatgcgctcgaacgggcgaatttgcttgaacagggaagtgaaagcaaaagcttcggaaccggcacggggctgatgccgggagaaggagtcggtgcggtgctcttgaagccgctctccaaagcggttgccgacaaagaccatatttacggggtcattaaaagcagcgcgttgtgccatagcggcggaaggcagatgtacacggctccggatccgaaacagcaggcgaagctcatggcggcttccattgacaaagccggaatcaatccggaaacaatcagttatgttgaatcagcggcaaacggctctgtattgggagatccgattgaggtcattgccctgacgaacgcgttctcgcaatataccgataaaaaacgattttgcgcgcttggatccgtcaagtcaaatctcggccatttagaggcggcctccgggatgtcccagctcgcgaaagtgctgctgcaaatggagcgggaaacattagttccgaccattaacgcaaaaccgcaaaatccgaatatcgcgcttgaacaaacggccttttacctgcaggagaaaaccgagtattgggagcgtctgaaggatgccgagacgggagacatcgtaccgcggagaagcatgatcaattccttcggggcaggcggggcatatgcaaatctcatcgtagaagaatatatcagcccgaattccgatcaggcccgtcacggcgatgaggaatatattttccctgtgtcagcgaaaacaaaatggagttttgaagcctatcttgagagactggcggcctttttagaaaagacgccatctcttcatccggccgccatcgcatctgcgctgcaaaaaagaacgcatcatccggagtatcgggcggcatttacggctgcttccgttcaggaactgctggaaaaactggccgcttaccgcatggatcagcggaatctcaatttctccgattctgatatcggccggcgtgcgcggcaatgggaaaaaggagagaatatcacgtttgatcagttgcagcaagagcacgccgttcatctgccggcctacgcttttgaccacgggacttcttttcatttcggtgaatcagaaaacgctgccggcgttcaggcggtatacagtgatgacgacccatacgtgaaagggcatcaattcggcggagaaccggtactcgtcggcgctacatataacagtctggcagtcgatcatttttgtgacctttttcctgaagcggaaggaggacatattaaaaaactgaattacgtcagccccattaccgtaaaaaaaggcgatcacatcgagctgaaaacagaatcgaaacaaaacggggatggatttgaactgagcataatgcaccgcagccgcacgtctcctgattggagcatagcggcgtatgccgagtgcagcccgtatccgtttcaaaagcagcacgcagatctggcggccattcagcgctcttaccgggaagtgggccggatagatgagttatacggagatggaacgggaaccgtcgtgtggggagaagaatttaaaacgatcacccgtctgtacaaaggcactgatgccgttttagcgaaagtgaacctgaacaatagcgactcacaacaagcgcatcattatgccataaatccattaatcgccaacagtgcttacttggcctcgctttctttattggaccaaacagagacggaaagctatctgccgttcggcattaattccgtcaccttcagcagcccggaaaatcttaccgattgctggctgcacatcaagctggctaaacaaacgggggaaatgattctgattaacgcagatgtcatcagcagccgatcggaagtggtgatgcgttttgaaggctatgccctgaaacggttccgcccgaaaaccgaacagatgaatcagccggcccgaacggctgttaagaatgcgggagcaccgatttctgccggcagtctgacagatgatatccgcagctacgtccttggcaagctcgccaagatgatggatgaacccgcgtcatctcttcgttctgacgcgaatatcatggaattgggacttgattcagcgagtctgatcgggctgacaaaagagatcggccaagaggcggacatcgatgtgaatccaacattgtttttcgagtatccgacggcggaggagctgacccgccacttcgcgtcagcatatgagagcaagttttctcaattgcttgccgatcataggcattcagaagaggccggggtcacggaaacagaagagcgcactttaccgaagaaacagcatacgccttgtgaaaacgccgatgtcaagcaaggaatcgcgattatcggtatgtcagctcagtttccgcaatccccggatatccagtctttttggggacacatcgtaaacggggatcactgtattaccgaaattccggcggaccgctgggactggcgccgttacgccggcgatgagaatgacacgagtctcagatggggcggttttattgacggtgtcggcgaatttgacccgctctttttcggaatttctcctaaagaggcatcacaaatggggccggagcagtttctgcttttgatgcatacatggaaggcaatggaggatgcgggcctgacaaataaggcattatcaagcagaccgacaggcgttttcgttgccgcgggcaacagcgatccgaacaatggaacagccattccgtccatcattccgaacaggatatcatatgccttgaatttacaaggaccgagtgaatattacgaggctgcctgcacgtcaacgctggtggcattgcacagggcggttcaatcaatccatcataacgaatgtgagcaggctgtcgtgggcgccgccaatattctgcaatcgccgaaaggttttatcggttttgactcgatgggatatttaagcaaaaacggccgggcgaaatcgttccaaaaagatgccgatggctttgtcagaagcgaaggggcgggcgttatcatcatcaaaccgcttgaggcggcaattgaagacggcgatcatattcacatggtcattaaaggaacaggagtgtctcacggcggtaaaggcatgtcgcttcacgcaccgaatccggcgggaatgaaggccgcgatgaaaaaagcgtacgaagacaccgatgttgatccgcaaaccgtcacttatattgaagcgcacggcattgcctccgaaatggcagatgcgctggagtttaatgcaatcaaagcgggttacggcgagtctgcaaatcaagaggaaagcgcgccttgttatatcagcaccgtgaaaccttgcatcgggcacggcgaactcgcttccggactggccgcccttataaaagtagcgatggccatgaagcatcataccatcccgggcattcccggatttacagctgcaaatgagcaaatggttattcagaaaagccgcttccgtttcaccgaagacaatcaggaatggtcacagctcaccgaccatacgggcagaccgatcccgcgccgggccgcaattaacagctatggcttcggcggcatgaatgcgcatgtcgtcttggaacagtacagtccgagccataaagacaaagaatctgcgcatgacccgcagcttatcgtgctttctgctaagagcgaagggcgtcttaaggcggccgcaggtcagctggctgattttgtgcaaactggagatactccgtcactgcgggatattgcttatacgcttcagaccggccgtgaggcgatgaactgccgcttggcactcgttgcccgcaatcaagatgaattgctggaaaaactgaaagagtacagagcattttccgaagaaagcaatggaatgaaaagcttctttacaggcagtcagcagactggatcaggagatatcggcgttttactggaagggactctcggtacagtcgtcacggagacgctgttggctgaaaacaatctggaaaagcttgcattttgctgggtgaaaggagcggatataccgtgggacagactccaccaaggcaaatctgttcaaagagtgccgcttccgacatatccttttgaacaccacaagtattggaatggcggtcagccagaagacatcacccttgcgccggtttcccaggaccctcagctccgccgcgagagcgcagctgacattgtggctgacattttggggatgaaggcagcggaaattgatcaaaataagccgctgactgaatacggctttgattcaatctcctctattcagctgctgaaaaaacttgaggacggagacagccgcatcagtctggaagctcttcagaaatgcagcactcttcaggagatcggcatgctgttaaaaacgaaccagccgcatgaagcgggccggaattttcccgaactcgtcaagctgaatgaaagagaaaaaggccgtcctgttttttggtttcacggcggaacaggaggcgttgaagcataccagccattcgccaaaaagagtcagcgtcctttttacggcatccaggcaagaggtttgacagggaaagagccgctgcaaggaatcgaagagacggccgcttcttatatgagaatcatccaagcggtacagccgaaaggcccttatgacctcggcggatattccttgggcgggatgcttgcttatgaaaccgcgcgcctcttgcaggaggaaggtcatacagtaaaaagcgccgtcatgatcgacaccccgtacagtgaaaaatggaaagagagaaaaccatctgttaagtcagtcatgctgcaaacgatcaatacgatgcttacggcatatcttaagcctgaaaaccttgaagaggcattaatcagcagagaagacattaccgtccaggctgaggaagaagaagtattgaaagaattgatcggccttgccaaaaagcgcggtctgccaaaatccgaagaagcgatccggatgcagctggagcaaatgatgaagacgcagctcgcttacggaatggaagagtatgacatgaagccgctgcctcatccggaagcgctgcaatgctactacttccgtaataaaagcggtttgtttctcggagattttgaacgttatctgacagcagaggaagaacaaattccgttagaccatgatgcgtattggaaagaatgggaacaccagatgaaacactttcacctgctggacgtccactcttccaatcatgtcacaatgctgtcggaaccaaagccgcaaaacgccattaaggcattctgcgaaaaactgtacgcaaacaaaggaacgataagcgcaaatttccttaaatctttcaaaaaaaagctggacgaaacaaatgagttggtaaaacggtaatagagaacggccggagcaatccggccgctttttttacaatagaactaaatacactatgtactaaatattcactgttatattgatttcctgtttataagacattaaaaaacccccgataaacagggggcgatattaaaatctgacaggcaatgtttcaagccctctcaaaaacacgttttttctccactttacatcctcgtgcgcgcctttcagctctatattcggaaaccgttttaaaagcgaagtaaaggcaatggatgcttccatccgggcgagcggagccccgagacaaaaatgaatgccgaatccaaaagagatatgacggttcggtgttctcgctatatttaatgtatcaggatcatcgaaatattccgggtcccgattggctgaaccgatgccgataaatatcatatcgccttttttaatagaaacatctttataggtgaaatcttcaatcgcccatcgattcgccatcatgatgacgggagaggtgtaacgcaaaagctcttcgaccgccgtctggatattttcgggctgtcgctttatcttctccatctggtctttgtgcagaagaagcgccagggtgccggagccgagaaggttaaccgttgtttcaagcccggcaacgactaacaaaaacagcatggaatacagctctgattcactcagcttttggccgtcctcttcagcgtaaataagcttgcttgtcagatcttcagcgggatgttttcttttttcttcgatcagtgttttcatatattgtttaaattctttgagagcctggttggtcgcatcttgtccgctctctgacgtgtcgaccatcgcgtttgtccatacttgaaatttggcgcggtcctctttcggaattccgagcagctcggaaatgacgataaacggaagcggtgccgcgaaatctttcatgatatcagggtctgcttttgtttccatttcatccagcagctcttctgtgatctgctctatcccggtgcgaagctgctcaatcatccggggagtgaacccctgatgcaccaaagatcgaagacgtgaatgatccggagggtcttttgccagcatatgctctgagacaaaatcgatatcttcgctgacattcagcttcgcgatcagctccttcggcataacccgttttacatctctcgtaattctgccgtcttttaaaaacgccatacaatcatcataacgcgtgatgagccatgccggaaaggtgcctccgaaacgctgcagttcgaatttatgtatggggtcctgctctctgaatctgcttaaaaccgcaaaagggtcttcgtgaaactcgggtgagtgtgggtgaaacattgttttttccatctggatttccccgccttcatgtttttgaaaagacataaccaacagccggtgcctgccgaccggacggcattcctccttttatctgccgaagacactgatcacaacggctcataagtatgtctaaaatatataaggaaaaagaagccggttcaatagacaaatcgtaaagccgccattttcgttgattatcaacaaaacagcaaactttttttgccatttcatcatgtgtgttaaatccggctaatatacatatttacgcttcatatcaacttcttaaggaggatgtgaatgaatgcgtttatgaaatgggcggcaagtctgcttttggtgatctctcttcagttcggccttacgggcgccggcatccattcggacagtgctgctcatgctgcatcccgatacgatcaggtgctgtatttcccgctgtcaaaatatccggagacgggaaatcatataaaagacgccatttcggcaggtcattctgagatttgtacaattgatcggggcggagcggagaacagaaggaaagaatcattgaaaggaattccgacaaagcccgggtttgaccgtgatgaatggcccatggcagtctgcacagaaggcggggcgggggctgatatcagatatgtaaccccatcggataaccgcggggccggttcatgggttggaaatcaaatgagcggctattccgacggcacgagagtattatttatcgttcagtaacttctccggttcgccggagtttttttatgctttgaaaaagcggcacgccggctggacatatgaaatggcaaagagtaaacttatatgttggaatcagcatgagaaaggattggatcacattgacagtgactacataccgaaatattgcacttttacttctttgtttaacagcgggaattgtggatgtgatcggttatttaagcctgggacatatctttaccgccaatatgacggggaacatcgttctgttcggcctggcgatcggcaactcatggcaccttgccgtactcaaatcgttaacctcgttaatcggatttattgccggcgttattgccgcggccctgcttgtgggcaataaaaagaaatcattctggccccctgcggtaactgccgctttagctattgaaggagctgttttgctgctgtttgctttgttctcctgcttttttgcagacgccatttctgtttatgtgctgattatgctgctcagcttcgcaatgggaatgcagacgacagccgcgagaaaacttggtgtagcggggatttccacgaccgtattaacgggaacgctcgctaatttttttgaagatctcaccgcaaggttttacaaagcggacaagcggaagcagtttacgagagatgctgtattgcgcgcgcttgccttggttctgtattgctttggggcggtcataggcgcttttgccgaaccggattataagtttgccgtgatctggctcccgattatcattattttaggcattatgctttgcgcattcacgatgttccacggatattctgaagaaaaaaaccaataaaaaacgccgctgtttcacggcgttttttctttttattgctctttccgggtcccgattgtatacacggcccgatctgtatgtacctttaatccgtcttgctcctgttggatggtaatgtcgccgagcagaggaatttcatacgcatcttggggaagcgggacatttccttcctccgtataggttgtgccgtgcccttttaagacgagttcttcatccgctacatagtcatcgggatggtttgtccggcggacgagaacgtcatcaaggtgaagcatgatctgatccatatcagaaatctcgtttcggctgtctgtcagctctccttttctgatatcaagcgtttgtccgatctgtttttgcagccattcagacaattcggtgtttgtaagtgccattgtgattcctccttttatctacaccatacttattccctatttttttagaaatacactgccttgcgttgatctttttttctgacagccggttctgacctgttccgagttccttcattataaatgtttcatctattcacctgaaaaacggagtcatctgccggtgcagacgaccccgttctcatgataaaaaggttactctttcggcacggcgttttcggcgttcactgcgcccgctccgtaaatgttcggatcttcatttgtccattgatccggactttgtctgatcaatgttttcacttcgtcaggcgaaagctgcgggttttgctgaaggattaaggcagcgatgcccgcacagatcggagtggccatggacgtgcccgacagactgaaatacaaggagcctactcggtttgatttctgtaatttgtcaagatatgaacgcggagaacgaagagatacgatatcgaccccgggcgcaagaatgtcaggcttctcttttccgtacaccgtcgggccgcggcttgagaaagaagcgaccgtatcgtcctcattgctggctgtatcattgtcatcataggcgcctaccgtgatgaccttctcgctgacaccggggcttgaaatcgtttgagcttccggaccggagttgcccgcggcgacgcagacgacgattccttcattccatgcctcttcaacggccttgacgagcgggtcgtccgtttctttatcatatttgagcgcatctccgcccagcgacatgctgatgattctgatcggattctttgtgtgttctttattatattgtatgcaccattccacaccttcaatgatatcagccaaggttcctgatcctgatttgtttaaaaccttgactccgatcagatcggcttccggcgccggcccctgatatttacccgaagatgaagcgccgctgcttgcgatatcaccggcgcaatgggtgccgtgtccgttgtcatcatacggttctgtcttttggttgacaaagtccgcaaagccgataatcctgccttctaaatcaggatgctgatagattccggtatcaataacggcgacggttacgccttttcctgttaatacggtgccgttacgggtcacttcttttgcatgagacgattcagctgctgtatcaaggagagcttttacttcacggtttaaatagattttacggatatcccggcattgcgaaagaagcatgtgaagggcggacggcgtgacttcggcgctgcagcaattgattgtttgaaactgcttttttatggtgcagcgtttttcttttgataagacctgtcctgtgctgtgaaaaccggattcatggcagccctcttcaaattcaatgatgactgacattttctttctgtttttcacctttttttcgaaaaaattgtgtaaaaagcaaggtgtccatttgaaaggtttatataactgtaatacgttttctctgagcggccagtccagcttatgagcatttgaccgcaccatttgtaccattgagtaaccaaacatatatacttttcctcccattctggcgattctctctataccatatgaacaggccgtaagttcggtcagtttgtttgtccttcaggagcgctggttacttgcggctttttcaggagaagaaatcgagttgaaacggaacgtttgttcgttttgtaatgaagccggcggaaggtagtatatacatgaacatcatattgagacattccttggaaaaacagcttccgattgatattatatatatgaataaagagacggctccgtttcaaaacggaccattatgataaaaaaaggggatgagcgggctgtaatggcattttgctgtacaaaaaggcagatgagaacttttttgacgggctccattctgtcctgcgcatttgcttcgggaggcggatattcatttctaaaagcgtattcttgatgccgtccgtttccggccgtgaatctcccgcccctgaaaattcgggcgttcctccctttttttttgccctctctcaaccttttttcactgatgcccggcatttgagcgcttgaaccgtgacaatccattgatttttcgaaaccgggaagtttttcactgatgataatgttaatagaatgttaagataagacctattgacaaaaatccatataatgaatatttcatttttcagaaaggagcaaagaaggagagctgatgaaaagaattttacttaatgtcatcattatcgtagcaatggtcttactaataagatgtgctcattatgcgtcagaccctgatccctcgaattcttctgatacatacacagattttaaagatctggctgaacatgaagaccccgatgattatcatatatcgtacaataagagaaaggggagccccgtattgatcatgtccccgcacggagggagaattgagggcggggtgagcgagatcgtccgctctttcagggatgattattcaacctacctgtttgagggattaaaagcgcatgataaccagactcttcatattacgagcaccaagttcgatgagccttcagcagtcgaaagcattaagcagcaccattatgttatcgcagttcacggttataaaggcgacgagaaaaatactcttgtcggaggaagcgaccggaagcgggcgaaaaaattggtgagagctctcaaacgaaacggatttcctacagaattggcaacctcaaaaaccggtctggccggggttgacaccgaaaatatcaataaccaggcgcaaaccgggctgagtatacagcttgagatcagcagagaacagcgggaggcgttttttgataattttgattaccgcgaaagggaattcacaaaaacggaggaattttaccggtttgtccgtacgataaaaagagtgatcaatcaagagtattcgtgagcttaaaaaaagacaaaccagtgaaaggtgagtaaactgaaaaaaaaggaggtttgtcccttggcaaaacatcacttttatttaaaagcaaattggcccggaaatcgcaatgacgtcggcgatattaaaagcggccggctggaaaccgctgtgtccattcctaaggaaatggacggacccggagaaggcacaaatcctgatgaaatgctgcttggagcggccgcgacctgttatattataacgcttgcggcgatgatggaaagaagcggcctggataaagaagatctacatatggaatctgaaggaattgtagacgtcacgaacggtgtgttcacgtaccagaaaatcattcaccgcccgtttatattattaaagccggatgcagccgaaacggactttacgctcgccaggaagttagcgcaaaaagcggagtcctcatgtatgatttcacgagcggtccaaggaaacgtggagatggagcttgaggttgaagtaaaagctgcccgcgcttgacgagttcaaacggtcagctccgggccgtttgattttttttagctttttgagacttggaacggttcagcaggatgacgcccgtgatgacaaaaataagcccgatcatcattttagctgtcatggcttccttaaaaacaaaaaagccgacaattgccgttaaagccgtgccgacacctgaccatgtcgcgtatgcggcggataaatcaaggcttttcaaagagaagctcaaaaacataaaagaggctccgattccggcaatgacgccgagagcgggccataagtgcgtaaaaccgtccgacagcttcagcatcgtgcttccgaacacttctgatacaatggctaatgccaggcagagtaatcctttcatatcatgcttctcctttctaccaattcatcagaatgacaccggccaataagaatacaagtccgatgacggcctgcttgtccagtttttcatgaaaccatttcgctccgataatggatgcgagcaccgttcccgctccgctccatgttgcataggataagctgagcggaatgagattcagtgtaagtgaaagcatataaaaggccaatgaatagcctgccactacaagcgcgctcggcaaaaaccgcgtaaatccgcgggagaccttcagcatggccgcgccgattgactctgataaaatagcaattgtgaggaagatataacccagaatcatatcaaatccccctctcatcataatccttatgccttttgtttaaggcagtaaaataaaataatatccgaactttgcccgccaagtcaagacattaggcctatataaaaaggcccctgaaaggagccctttttgattgtcttagtagtaatacggatagtaagggtagccgtaacctccgtacaggtacggattgaataaagcgcttccgacaagcccccgacaagccctccgaagaacggtccgccgtaaaaaccaaacggccgtccgaatccataaccaaaccaaggccggccaaatccaaaacccggccgcccgaagccgaagccgaatccgggccgcccgaacccgaagcccggccgtccaaacccaaatccgggccgtccaaacggtctcatatcactatctgctgcatatgtgtattcttcattcataatttaggtacctccaagaataaatttgagatgataacagagtattcagcccaccaatttttgattgggcatttatcaaaaaaataaaggagtgagcttttgtgggcctgtatcagtccgattggtcaaaaaaacctccgcacacacacgcataccgggctgttacggatgtagtgcaggggcactaccatatgatcgaaggcttttcgcagccggagaacggcagcaatacagatgagcatacacatttctatacgggcatcacctcgtttgaaaacggccattttcataggtattacggcatttccggccctgccatcccgagggttgacggaacacattaccatgagctttcagagaccacctttgccgcctacaatgagccgattcggatccagcatggcggcgtcgtttacgatccgcgggaggaaggacggaaaacgcaccgccatacgctcaaaggaaaaacgagagaggttgtcggaaacgagccgatcgggtggtagcggacgtttagcgctcaggaaaaagggcaaaatggataggtgcctgaagaaatgaatgctataattagggggagatttataaaagagagtgatacatattgaaaaataaaaaacagcctgtcgtcatactcgtcggaccgacggcagtcggaaaaacaaaactaagcatcggactcgcgaaaatgctgaatgcggaaatcatcagcggagattccatgcaggtatataaagggatggacatcggaacggccaaagtcaccgaagaagagacagaaggcgtgccgcatcacctgattgatattttggagccgtccgacactttttcaacggcggattatcagaaaatggtgaggggaaaaatcaccgagattgccggtagaggaaagctgccgatgattgtcggggggacgggtctgtacattcagtccgtgctgtatgactatacgttcacggaaaactccggcgaccctgtattccgggagcgaatggagaaactggcggctgaagaaggggcggaagcgcttcatgccaagcttgcggcagccgacccggaagcggcggcagccattcatcaaaacaatacgcgaagagtcatccgcgcgctcgaaatcctgcatgtatcgggaaaaacaatgtcagagcatcttaaaacccaaaaacgggagctgctttacaatgcggttcttatcggtcttacaatggacagagaagtactgtacggccggattaacgagcgcgttgacctgatgctggaaaccggccttcttgacgaagtaaagcggctgtatgatatgaatatccgggacagccaatcgattcaggcgatcggctataaagagctgtatgaatatcttgatggaaaagtgccgcttcctcaggccgtggagcaattaaaacaaaattcaaggcgatatgcgaaacgccagctgacctggtttcgcaataaaatgcccgtttcatggacagatatgacgccgcctgttgatattgagcagaaaaaaaaggaaattttcgagtgcatagcaggaaaactggaaatttaatcgaaacagtattgtattgagaaccaaggaggacgaaacatgaaaccgattaatattcaagatcagtttttgaatcaaatccgaaaagacaatacgttcgtcacggtgtttttactcaacggctttcagcttcgcggccaggtaaaaggctttgacaactttaccgttttgctcgaaacggaggggaagcagcagcttatttataaacatgccatctccacgttcgccccgcaaaaaaacgtccagcttgagcttgaatagactttttgacaaagaccatgaacaatggtctttttctatgcgcgtctgtatattgcaggccgtatatcggaaagataaaagggggttcggaaaatcgtgttcgaaagtgaaaatgaactgagaagaatcaggattacgctcgtttggatcgctgtttttttgctgtttggagcttgcagcaatcacgagacggtggtgacggatgatgacggcggcttggcggatgccgaatcgcagacagaaggcatggtgcagctggaacataatcgtttcggcattgtcgagggcggttatctaaaaatataccgctatgatgaaaaaacgaataaaatcgaactgaaaaaagaaacggcgctggatgagcttgaataaatttcacaagcgttcgaatttacaaagcgggccgcacaagctacactaagtactgacattgatcatgcagagggtgagacgattgaaacacaaggtgataatcaaccattgggaagaaacttgtgaagatgattcctgctatgaatatggaaccagcatcatcgttgacggcaaagaactgatcagggaggcttccatcacaagcgctctgaaagccgtactgaaagaaatcggtgctgatgtagagattgaagaaaccgttgaaagcgaaaaaaaatgtgattcttacaaaaaataagaataaaagtctagactactaagcagttttttttcatgttatgatagacatcggcttacacatgacaccttgagtaggatgagagatgattctcgttctgctctcttttttgggcgttaatcgggccggagccaaagtccgctctttcaaaaatatgaattttttataaatcgatctcaatatgttgtgtttttctgagaggttagtatactatatatagtgttaagagattcattatttttgataggtcgtgataaggatggttcaaatcatatttgattcaaagacagggaatgttcagcgttttgtgaataaaacagactttcagctgatccgcaaggtggacgaaatggaccacgtggacactccgtttgttttggtcacctacacgacaaacttcggtcaggtaccggcatcaacacaatcatttctcgaaaaatacgcccatctcttattaggagtcgctgcgagcggcaacaaagtatggggcgataactttgcaaaaagcgccgataccatctctagacaatatcaggtgccgatcttgcacaaatttgaactcagcggcacatctaaagacgttgaattgtttactcaggaggtagaaagagttgtcacaaaatcaagtgccaaaatggatccagttaaataacgaaatcatgatccaacaagatggaaaattccagtttgataaagataaagaggctgtacatagctattttgtagactatatcaatcaaaacacagttttctttcacgatttaaaagagaagctggattatttgattgaaaaccaatactacgaagaggaattcttaagcctttattcttttgaagacattaaagaagtgtttaagacagcttacgctaagaagtttcgttttccttccttcatgagtgcgtttaaattctataatgactatgctttgaaaacgaatgacaagaaaaaaatcctcgagcgttatgaggaccggatctcaattgttgcgctgttcttcgcaaatggcgacactgagaaagcaaaagaatatgtgaatctgatgatcaatcaggaatatcagccgagcacaccgacatttttgaatgccggcagaaaacgccgcggagaactggtgagctgtttcttgctcgaagtcaatgattccttaaacgatatttcacgggcgatcgatatttccatgcagctttctaaactgggcggcggtgtttctcttaacctgtccaagctccgcgcgaaaggtgaagcgattaaagatgttgaaaacgccacaaaaggtgttgtaggcgtcatgaagcttcttgataacgcgttccgttacgctgaccaaatgggccaaagacaaggctctggcgcggcgtacttaaacattttccaccgcgatatcaatgactttcttgatacgaaaaagatttctgcggatgaagatgtgcgcgtcaaaacgctttctatcggtgtcgtcattccggataagttcgttgagcttgcacgtgaggacaaagcggcttatgtattctatccgcacacgatttataaagaatacggccagcatatggatgagatggacatgacggcgatgtatgaggagcttgttgacaacccgcgtgtcaaaaaagaaaaagtgaatgcgcgcaaattgcttgaaaagcttgccgttctccgttctgagtcaggttatccgtacattatgttccaggacaacgtaaacaaagagcatgcgaataaccacgtatcaaaagtgaaattctcgaacctttgctctgaagtgcttcaggcgtcacaggtttcggcttacacagattatgacgaggaagacgaaatcggcctggacatttcctgcaaccttggttcattaaatattttgaatgtcatgaaacataaatcgattgagcgcacggtgaaactcgcgacggattccctgactcatgtatctgagacgacggatatccgcaacgcgccggcagtcagacgcgcgaacaaagcgatgaagtcgatcggtttaggcgccatgaaccttcacggctacctggcccaaaacggcatcgcttatgaaagcccggaagcaagagattttgcgaatacgttctttatgatggtgaacttttattccatccagcgttcagctgagcttgcgaaagaaaaaggcgaaacgtttgagcattacgaaggctccacttatgcaacgggagaatatttcaataaatacatcgaaaaagagttctcaccggcatacgaaaaaatcgctgcgctctttgaaggcatgcacatcccgacaatcgaagactggaaagagctgaaggcgtttgtcgccgaaaacggcatgtaccacagctacagactgtgcatcgcgccgacaggctccatttcctacgtccaatccagcacggcgtccgttatgccgatcatggaacggatcgaagaaagaacatacggaaattcaaaaacgtattacccgatgccggggttagcgtctaataactggttcttctacaaagaagcttatgatatggacatgttcaaagtggtggatatgatcgcgacaatccagcagcatatcgatcagggaatcagctttaccctgtttttgaaagatacgatgacaactcgtgatctgaaccgtattgatctgtatgcccaccatagaggcatcaaaaccatttactatgcaagaacgaaagataccgggcaggacagctgtctttcttgtgtcgtttgattaaaggagagttaacagtgacaaaaatttatgacgcagcaaactggtcaaagcatgaagatgatttcacccaaatgttctacaaccaaaacgtaaagcagttttggcttccggaagagatcgcattaaacggcgatcttcttacttggaagtatttgggtaaaaatgagcaggatacgtacatgaaggtgctcgccggcctgacactgcttgatacagagcaggggaacacaggcatgccgattgtggccgagcacgtcgaaggccatcagcgaaaagcggttcttaatttcatggcgatgatggaaaacgcggtgcacgcaaaatcatattcaaatatttttatgacgcttgctccgactgaaacgatcaacgaagtatttgaatgggtaaagcagaataaatatctgcagaaaaaagcgcaaatgattgtcgggctttacaaagccattcaaaaagatgatgaaatttcactgttcaaagcgatggttgcttctgtctatctggaaagcttccttttttacagcggtttctattatccgttatatttttacggacagggaaaactgatgcaaagcggtgagatcatcaacctgattcttcgtgatgaagcgatccacggtgtatatgtcggactgctggcccaggaaatattcaataaacaaacagaagcgaaaaaagcggaacttcgcgaatttgcggttgagcttttagaagagctttatcacaatgagcttgaatatacagaggatctctacgaccaagtcgggctgtctcatgacgtaaagaaattcatccgctataacgccaataaagctttgatgaacttagggttcgatccttactttgaagaagaggatattaatccgattgtattaaacggattaaacaccaaaacaaaatcacatgatttcttctccatgaaagggaacggctacaaaaaggcgacggtagaaccgattaaggacgaagatttttattttggccaagatgaagagcagatataatatctgctcttttggcttgagtggagaggtaagacaggaggaacgggcatgaataaaatggatgaaatcatcttggctgcaccgcggagtgacgtctttcaaaacgaaatgctgacatttcagggagtcaacagcgaggatgaacgtatcataaaaattatggctcaaattgaggcgcatttttttgaaatcagaagaggcgacgcggaagaggacccgcgatttaaacagccgattccgtatgtcgtcatccgccgcgatgatgaggtatttgtgtatgaacggctcgcgggcggaggggaatcgcgcctccataataagctttctctcggcttcggcggacacatgaaccctatggaaggggcggcttcatttttggaagtgctgaaacagaacaccgaccgggagctggcggaagaattgtacattcgcgaggaggacaaacaaaacattgtcacactcggcctgatcaatgatgatgaaaacgatgtagggaaggtgcatatcggcatcctttctgcgctccagttagcgcctgcagcacaagtcgaagtgaaagaaaaagatcaaatcgccgggcgctggatgaaactgagcgaactgaaagaggaaaatgtgtatcatcgtcttgaagcttggtctcggtttgtcgccgatatacttcaataacaaaaaacccccgttcgtcccaaaaagggagagcaggggttttttcatttagtcttgcacaatgaaggcatcaaatccggctttttcggcccgcgctgccaacgcttcagcataatctctgaaagagaatgcgccgatctgcactttaaataagccgccttttggaagcacaatcgcgtcaaaacctttagacaccgcatcggcggcaagcgcatcagcatttgctttcacgttgaatgcgccgatttgcactttatataagtcagcctttttttttagaccgaaagcttgctccaagcccttggcatgtcctcttgcaaggctttcaataaaactggctgttttcagtttgtttgcatcagctgacgtatcaacaaaaccattctccgtcaaaatcgccggcatccttgtctcccgcagcacatggaagttggctgttttttttccgcggtcattaaaacccgatgcttgaattacttgcgtgtggacggctgattggtaagtcgaggtcggcgctccgacaccggggtaaatatagctttcgaatccggttccgcctcctgagttaatatgaatggataaaaaataatctgcgccccagctgttggcggcatccgttctttccgtcaggctgaccgtcttatcgcttgtcctgctcatcgtgacagaaactccttcatactcattcgtcagaatcgtgcgcaaagccagtgcgatctccagcgtgaccgctttttcctgaagtccgtttccggttgcacctgaatcagttccgccatgaccggggtctataaaaattttaaccattctccatcacctcattacagcatatgatgatattcaaaaggtgcttgtacggctgtcattcatgaaaaaaatgagaaatacacccaacatttcccggaaaataaaaataaatggtttgtcctcccgtttttgctgaatacaataagaaatgaaaaatatttctcgggaaagcgcaggattcaacatcattcccgaagagaacggaaaaagtgacagataaagaggaaaacgggcctcatgatgataggcggatgtcacagaaccgcttcatcatgagtaagataaagagagaacagagaggtgagcatgttggagcgcgctgtaacctataaaaataacggacaaattaacatcattcttaatggccaaaagcaagtgctgacaaatgcagaagctgaggcggaatatcaggccgccctgcaaaaaaatgaagccaagcacagcattctgaaagaaattgaaaaagaaatgaacacattagtgggtatggaagaaatgaaacgcaacattaaagaaatttacgcgtggatattcgtcaaccaaaaacgggccgaacaagggctgaaagtcggaaaacaagctcttcatatgatgttcaaagggaaccccggcaccgggaaaaccaccgtcgcgagactgatcggcaagcttttcttcgagatgaacgttctttccaaaggacatctgatcgaagcggaacgtgccgatctcgtcggtgaatacatcggacacacggcgcaaaaaacgagagatctgattaaaaaatcgcttgggggcattttattcattgatgaagcatactcacttgcaagaggcggagaaaaggatttcggtaaagaggcgattgatacgcttgtcaaacatatggaagacaaacagcatgaatttattctgatcctggcagggtactcgagagaaatgacacatttcctgtcattaaatcccggtctgcaatcgcgcttccctatcagcatcgattttccggattactctgtcactcagctgatggacatcgcaaagcgcatgatagcagagcgggagtatcaattaagccaggaagccgagtggaagttaaaagattacttaatgacagtgaaaagcacgacaagccccattaaattcagcaacgggcgctttgtcagaaacgtgattgaaaaatcgatccgcgctcaggccatgagacttttaatgggagaccaatacttgaaaaacgatttaatgacgatcaagagccaggatttacttataaaagatgaggcggcagctcacgaatagacctctcagccggtttgaggggtctcttttttatttctctctttaaaacccgccggatgtgtggtatacgccctgcgggtttggtatgatagtactactgcccaatacgacacagaaaggaacatccatttgaacgaacaggaaggaaaaaaagaaacggtcattttggtcggctgccagcttccgcacatgacagatgagcactttgaacattccatggaagagcttgcttcattgacaaaaacggctgacggaacggtgctgacccggattacgcaaaaacggaacagagcggatgccgctacatacataggcaaggggaaagtagacgagctgaaggcgctgtgtgaagagcttgaagcggatctggttatttttaatgatgaactgtcaccgagccagcttaaatcactcgccactgcaattgaagcgaagatcatcgaccgcacgcagcttattttggatatattcgcaaaaagggcgaagacgagagaaggaaagcttcagatcgaattggcccagcttcaatacgcgctgccgcgtctgagcggacaaggaatcaatctctcaagacaaggcggcggaatcgggacgagagggcccggtgagacaaagcttgaaacagaccggcgccacattagaaaccgcatacacgaaattaacgtgcagctgtcaacggttatccgccacagaagccgttatcgggagagacgcaaaaagaacggcgtgcttcaggctgcactcgtcggttataccaatgcaggaaaatcaacgtggttcaatcaattaacaagctcagacagctatgaagaagatctgctgtttgcaacacttgatccgatgacgagaaagatggcgctcccaagcggctacagcgtccttttgtctgatacggtcggcttcattcaggatctgccgacgacgctgattgccgctttccgttcaacgcttgaggaagtgaaggaagcagacttgatcattcatgtcattgattcatccaatgaagattatgccgggcatgaacagactgtcctcggactgttaaaagagcttgaggcagatgatattccggtgctgaccgcttataacaaacgtgatgagacacttcctgacttcatcccgacagcgggagaaggccacatcatgatcagcgcccgaatcgccggggatgaagcgaaactaaaagcggaaatcgaagcttatttgcgccgggagctgatgacaccgtatgaagttcatgtgcctgccgccgaaggcaaattgatgtcacgcatcaaatcagagaccatgatcgacagcctttattttaatgaagaaaatgaacgctacgaagtctcaggttatgtacaggaagaacaaagcatactcggagaattgaagaaattcatgtaaggaaggtatacacaacatgtttgacacactgacccacggcgctcttttacaaaaaaccgccgaagaaacagaagcggaaatctccgccgttcataaaagaatagaagaaatcagtgaacggaatgaatggagagtcctgcaaagctacagaaaacataaagtaagcgatacgcattttacgccttcaaccggatacggttatgatgatatcggacgggatacactggagaagatctatgctgatgtgttcggaggagaggagggacttgtgcggccgcaaatcatttccggtacgcatgcgatttcaatcgcgctcttcggcgtgctgagacccggggacgaattgctttatatcacaggcaagccttacgatacactcgaggaaatcgtcggagtaagaggcggggagtattcaggctcgcttaaggaatttcaaatcggatacaatgcagtcgatttaacatcagaaggcagagtggactttgaagcagtccgggctgcaatccggccgaatacaaaagtgatcggcatccagcgttcaaaaggatatgcgaatcgtccatctttcagaataaatgaaattgaagagatgattcgtttcgtaaaggaaatcaaagaggatgtcattgtttttgtggacaattgctacggagaatttgcagaagagcgggaaccctgccacgtcggagcggatcttatggccggctccctgattaaaaacccgggcggcggccttgctaaaacgggcggctatcttgtagggaaagccaagtggattgaggcctgctcttaccggatgacctccccgggaatcggaagtgaggccggtgcttcgctttattcactgcaggaaatgtatcaaggtttctttctcgctccgcatgtagtggcgcaaagcttgaagggagcggtatttaccgcccgttttcttgaaaagctcggctttacgtcaaaccctgcatggaatgcgccgagaacggatctgattcaatcagttgagtttcaggaccctgataagatgatcgctttttgccaggcgatacaatatgcatcaccgattaatgcgcatgtgacgccttatccgagctatatgccgggatatgaagacgatgtcattatggcagcgggcactttcgtacagggagcaagcattgaattatcagcagatggacctatcagaccgccttatgtcgcgtatgtccaaggaggattaacctacgcgcacgtgaaaaatgcgatttgcagcgccgtaaatgctttaatggaaaaagagctgatttagggcgtttgcaattttcaaagaatttgatgttaagattccttacattgtgttgacacaaaatataacatcacctataatgagactaagataagaaaaggaggaaattgagatgagtgataacattcgccgctcaatgcctttatttccaattgggattgtcatgcagttaacagaactttctgcccggcaaattcgatattatgaggaaaatggattgatatttccagcgagaagcgaaggaaatagacgattattttcattccatgatgtagataaactgttagaaatcaaaaatctgattgaacaaggcgtcaatatggcggggatcaaacaaattctggataaggcatctgccgaaccggaagaaaaatccgaaaaaaccgccaaaccgatgaaacacaatctgtctgatgacgaactcagaaagcttctgaaaaacgaactgatgcaggcaggccgtttccagcggggaaatactttccgccaaggtgacatgtcccgattctttcattaatccgttagcaactgttttgctatatacatttaccttttagaggaggagttttacgaaatggcaaagtacacaagagaagacatcgtaaaattagtaaacgaggaaaacgtaaagtatatccgccttcaattcacagacattctcggaacgattaaaaacgtggaaattcctgtgagccagcttgaaaaagcacttgataataaatgcatgttcgacggttcttccatcgaaggtttcgtccgtatcgaagagtctgatatgtacttatatcctgatctgaacacatttgtaatcttcccgtggacggctgaaaaaggtaaagtagcacgcttcatctgtgacatttacaatccggacggcacgccgttcgaaggtgacccgcgtaacaacctcaaacggattctgaaagaaatgaaagaactcggtttcagcgatttcaatcttggacctgagcctgaattcttcctgtttaaattagatgaaaaaggcgaaccgacgcttgaattgaacgataaaggcggatacttcgacctggctccgactgacttgggagaaaactgccgccgcgatatcgtgcttgagcttgaagaaatgggctttgaaatcgaagcatctcaccatgaagttgctcctggtcagcacgaaatcgattttaaatatgccggtgccatccgttcttgtgacgacatccaaactttcaaactggttgtcaaaacgatcgcccgcaaacacggtctgcatgcgacattcatgccaaaaccgctgttcggcgtaaacggttccggtatgcactgcaacctatcactctttaaagataacgttaacgcattctttgataaagacgctgatcttcagctgagtgaaacagcaaaacatttcattgccggtatcgtaaaacacgcgacaagctttacggctgtcacaaacccgacagtgaactcttacaaacgccttgttccgggctatgaagcaccttgctacgtggcatggagcgcgcaaaacagaagcccgctgatccgtatcccggcttcccgcggcatcagcacgcgtgttgaagtccgcagcgtagacccggcggcaaacccgtacctggcgttaagcgtattgcttgcagcaggccttgacggaatcaaaaacaaacttgaagcaccggctccgattgaccgcaacatctacgtcatgagcaaagaagagcgcatggaaaacggcatcgtagatcttccggcgacactggcggaagctctcgacgaattcaaatcaaacgaagtcatggttgcagcgctcggcgagcacctgttcgaacacttcattgaagcaaaagaaatcgaatgggatatgttccgcacacaggttcatccgtgggagcgcgaacaatacatgtctcagtattaatctctcaatcccttggcactattggtgtcaggggattttttaagttttggtcaaaaggttaagaggtcgatattttggtccttgaccaaaaaaaatgaagttatgaatctaactccataattgaggacacgtatttattgtaatcccttattcggtttaggatggaggctaaatgaagccaattatgctctaaaattgaaccggccatttttattttcaaaaagcaggagcaggaaattcatcaattttgatacgaagtaaactataaggtttctgtcgtaagtcttctccataatgaaaactagcctgccgatgtaattggttcacgatgacgtataagtatccatccggaccaatcgaaaaagtatccggccataaaattctcggatcatgtgcgatggtttccattgtgccattcggcagcatctttcgaatactattgttctcgtaatctccggcataaacggctccttttgcatctgtaatcattccatcagacgcgcctttttctccccaatacgccacatgataaagtaaatccatgtccgatatatttctatctctcagggcttctgttgagatagagaacaaatggcggctggtcaggggacaaaaaaataatacctttccgtcgggagagatcgcaataccgtcggatgccagcctaaatggggaagttgaaccatccttgttacgattcatcaaaattttgccttctactttcggtataaaagaggaatccggtgaagttggatttgctccatttaaccgtctaaatgcgtttccggtttctaaatcaacgacgataatagctcctggtcctttggaagaagaatccgttatataggcataacctgcagttccgacacgaaaatcaaatcggacatcattcaggtaggttgttggaaggacaacatcttctgtaaaggtatacactcttctgattgtattggtttttaaatcaacagcgactaattttgccccgcctttaattggttcagaaaaattgggcgccgctgtatctagtatccaaagcgttcctcttccatcagcaactacactttggacactgatgaaagtcattttgatattctcaaagttaaccaaattggtttgtgaatcaggataaggctgcaatttatctccaattatttccgctgccgtaaatttaacatcgtctccccatttcggaaaacaaatgaatatacgaccggtttctgagacagtaacaccggtaggcatagctccataaaatgcataaaccagttctaaatcaccaaaatatttttcaaaaggcagcataggtttcataatatcctcctcaaccaattaaacgggatatcacttatatatgattcgcattttttcaagtgcatgtttcttaataagtttttctaaacaaaagatgatggaagtgcttatcatttaataaatcagtcaggtgacacatagggtttttacttaacgtctgtcgaaggagccggcaattacaacatggtatgtcctttgatcggttttaaattttctgaaaaaagagttgaaaaagcagaaaagattttataatatgaaatcaagttagtttgttcgatcaacaaactaataaaccgctttaattgtccttcatgtaaaggtcttaaatggaaggggataagaggctcgatttaattggaggtatatataaaacgaaagccaagcttttatcctgttcactacgatgaaagtgctctgtgaaagtaaactgctatcattttttgaaagcgcttttataaagacctcactggccgataaaattgaagaaatgttataccattcatcatgttccttatgtaaaggatcgaaaaggggaggaaatcatgctcagtgaaaatgtaaagaagatcagcatggttgaaaaagttggatatgcgtctggagattttgcatgtaatttaatttatgcaacagtgtctacttatcttttgttcttctatacagatatatttggtttaccggcagcaacagccggtacgatgtttttagtggttagaatcatcgacgctctcgctgatccttttattggaacgatagtagacagaacaaatagcaggtttggacgcttcagaccgtatcttttattcggagcttttccatttgtcatactggcaatactctgttttacaaccccggatttttcggatattgggaaattaatatatgcctatatcacctatgtcggtttatcgcttacatacacaatgataaacgtgccatatggcgcgttaacctctgcaatgacccgaaataatcaagaagttgttagtataacgtctgtccgtatgttatttgcgaatcttgggggacttgtcgttgcattttttgttcccttactggctgcttatttaagcgatacgtccggcagcgaatctcttggctggcagctaaccatgggtattatgggagttataggcgggtgccttttaatcttttgttttaaaagcacaaaagagcgtgtcacgcttcaaaaatctgaagaaaaaattaaattatcggatatatttgagcaatttcgtgttaatcggcctctagttgtactaagtattttttttattattatttttggagtgaattcaatcagtaattcggttggcatctattacgtaacgtataatttagaaagagcggatttagtgaagtggtacggtttgttgggaagtttgcctgctttggtcattttaccgtttattccaaagcttcatcaattattagggaagaagaaattactaaactatgcattattactgaatatgatcggcctcttagctttactgtttgttccgccaagtaatgtattcctgatactttcctttcgattgctggccgctgcaggaagtctcactgccgggggatatatgtgggcgcttattcctgaaacaatcgaatatggagagtataagaccgggaaaagaatgggcggtctcatatacgctattatcggatttttctttaaattcggcatggccttgggaggggttgtaccgggtttggttctagatcagtttggatatgtggcaaatcaggcgcaaacgccggaggcattgacgggaattttaattacagcaaccattattcccgtgttcttactggttctggccatgattgatattaatttctataacttagatgagaaaaaatataaaaacatggttcgagaattagagaatagagacaaagtttatttggatcatattgacgatttcaaagcttaaaacatgatagtcaacagaaaatagctgaggaggcgttctgcatgaagattatcaatccagtacttaaaggattcaaccccgatccgagtatttgcagagtgggagaggattattatatcgctgtatctacatttgagtggtttccgggagtccagatacaccattcaaaagatttagtcaattggcacttagttgcacatccattacagagagtttcgcaattagacatgaaaggaaatcctaattcaggcggggtctgggcgccatgtttaagttacagcgacggaaagttttggctgatctatacggatgttaaggtcgtagatggcgcttggaaagattgccacaattatttagtgacttgtgacacgattgatggtgattggggggagccgatcacattaaacagctcggggtttgatgcttctttgttccatgatacggatggaaaaaaatatttattaaatatgttatgggatcagcgtattgatcggcactcctttggaggcattgtcatgcaggaatattctgataaggagcaaaaactgatcggtaaaccgaaagtgatatttaaaggaactgaaagaaagctgacggaagcgccgcacctttatcatatcgggaactattattatttattaaccgcagaaggaggaacgcggttcgaacacgctgctacaattgcccgttctgcaaatatcgaggggccatatgaagttcatcccgataatccaatcttaacgtcatggcatgatccaggaaacccattgcaaaaatgcgggcatgcatccattgttcacacacatacaggcgagtggtatttagctcatttaacgggacgtcccattcacccggacgatgattcaatttttcagcagcgaggatattgtcctttgggcagagaaacagctattcaaaagctctattggaaagatggctggccttatgtagaaggcggaaaagaagggagcttggaggtggatgcgtcttctatacctgaaaccatatttgaagacacgtatccggaagttgatgaatttgaggatgcgacattaaatattaattttcaaacgttaagaatcccttttacggagaaattaggttcattaactcaagcgccaaatcatttacgattatacggccatgaatccttaacttcgacatttactcaggcatttgtagccagacgctggcaaagtctccattttgaagcggaaacggctgttgcgttttatccggaaaattttcagcaagccgctggtttggtgaactattacaatacagagaactggacggctcttcaagtcacgcatgatgaagaacttggccgtattcttgaattaacgatatgtgataacttctctttttcacaaccgttaaaaaataaaattgtgattcctcgtgaagtcaagtacgtctatttaaaagtgaatattgaaaacgaaaaatattattatttctattcatttaacaaagaagattggtacaaaatcgatattgcattggaatcaaaaaaattatcagatgattacatccgcggcgggggattctttacaggagcttttgtagggatgcaatgccaagatacgagcggaaatcatattccggccgacttcagatatttccgttataaagaaaaatgaatgtccgcatgaaaaaggagctttctattttggaactcctttttcatattagaaaatgcccgtgtggaaaaacacgtcagaaatgctcccattcaggatgaaaataacaaaacaaaaaacccatctttaaagatgagcgtaaaacatagaagtttgtacatttcagttatgaaccatgtcgagaaaatgatcaatcacaatagaggacattcccaatgccggtgcgttttttcctaggatagatggtaataattcatagctattgtctaggtgggaataaaccctggacgatacttcgcttttaattgaatgtaaaactataggatgcgattcgatgatgctgtttcttaaaatgatggcttgcggattaaatgtatttaaaatattggtcaggcctatccctaaatagaatccaaaattctgtaatgcatgtaaagttccaatatcattcagatgggcgaggtctatgatatcttgagtggacacttttttctcttttgtctgaagagatgttaataaagccttttcggaagcatacaattcccagcagcctcggtttccgcagctgcatttcggaccattaaagtctattgtcatatgtcccatttctccagagaatccgcttacccctctgtataaatcattgtttataataacgccgattcctatccctgtaccgatacttgcataaatcatgttatcgtgatttttggcagcaccaaatactttttctccatatgcgccggcatttgcctcattttcaataaaaacgggcacattgaacttcttttggatgaaagattttaagtcaatatctctccagttggagttcggagcgaaaacaattttttgatttttatcaattaacccgggaacgcatatgcctataccaataagcccgtacggagattgcggcatatttgcaataaagtgaagaatcatctcaattaaaatatctttcgttatttcaggagagctgcattccaaatggtggtgttgatcaaggacgatcgtcccttcaagatctgttaaaatgccattaacataatccacgccgacatctattcctacggagtatcctgcttttctattaaaaacaagcatgacaggtcttctgccgccgcttgattgtccctgaccgatttcaaatacaagattttctttcattaatgtgtttacctgtgatgaaacagttgatttatttaatccggtcatttcagataattttgctcttgaaataggagaattcttaagtatttcgtttagtaataacttttggttaacttttttgacaaaggcttgatcagcgatatccacttcatccactccgtttgtataatctttaaattaagttgaacgttctgtgttatcgtgcgaaacgcagtacatagcgaatccaacctttattatatctaatgtgttcgtaaaaaactaaaaaaaatattgaaaatactgatgaggttatataagatgaaaataagttagtttgtttaggcaacaaactaatatataacatgacataaaatcatctgtattcgaatcatcaagtttagaatttatttttaagggggaaatcacacatggctcactctcattccggttcagtcaactattttgaaagcgtaaacaaagtgatttacgaagggaaagaatccacgaatcctttagcatttaaatactataattctcaagaagtaattggcggaaaaacgatgaaagagcatctgcgattttctattgcctattggcatacatttaccgctgacggcacagacatttttggcgcagctacgatgcagagaccgtgggatcactataaaggcatggatctggcgagagcgagggtagatgcagcgtttgagctgtttgaaaaactggatgcgccattttttgcttttcatgaccgggatatcgcaccggaaggaagtacgttaaaagagacaaatcaaaatctggatataatcgtggacatgataaaagactacatgagaaccagcggcgttaagttattatggaatactgcaaacatgtttacgaatccccgtttcgtccatggtgcggcgacttcttgtaatgcagatgtatttgcgtatgccgcagcccaagtaaaaaaaggattagaaacagcaaaagagcttggcgccgagaactatgtattttggggcggacgtgaagggtacgaaactttgttaaataccgatttaaaatttgagcttgataatatggccagatttatgcatatggcagtggattatgcgaaggaaatcgggtatacagggcagtttttgattgaaccaaaaccaaaagagccgaccacccatcaatatgatacggacgcagcaacaaccattgcctttttaaagcaatacggcttagacaatcattttaaattaaatctcgaagccaatcatgccacattagccgggcatacattcgaacatgaattacgcatggcgagagtgcatggccttctcggctctgttgacgcgaatcagggtgatccgcttttaggatgggacacagatgaatttccgacagatttatattctgcgacattagcaatgtacgaaatcctgcaaaatggcggtcttggaagcgggggattaaactttgacgcaaaggtcaggagatcttcttttgagcctgatgatttactatatgcccatgttgcagggatggatacatttgcaagagggttgaaagccgcccacaaattaatcgaagatcgtgtgtttgaagatgtgattcaacaccgttaccgcagctttactgaagggattggtcttgaaattgcagaaggaagagctgattttaagacacttgagcaatatgcgctgaacaatcagccaattaaaaacgaatcagggagacaggaacggctaaaagcgatattaaaccaatacattttacaggtataaccaaatgaaaaaagaagctccagatcccgcataaaagatgcaggcagccaagttcccggaattgcccgtcatgaagttactgttatggcgggtcatttcaacggaaatctatttagagaggaaggagtgaaaaaatgaagtatgtcattggaatagaccttggaacgagtgctgttaaaaccattttagtcaatcaaaacggcaaggtttgtgcagaaacgtccaaaagttacccgctcatccaagagaaggcgggatatagtgagcaaaatcctgaagactgggtgcagcaaacaattgaagcgttggctgaattgatttcgatatccaacgttcaagccggggatattgacgggattagctattcaggacaaatgcatggattagtactgcttgaccaagatcggcgggtgctgcgtcatgcgattctttggaatgataccagaacgacgcctcaatgcagcaggataaccgagacatttggcaatcatctgcttgatatcacaaaaaatcgtgtccttgaagggtttacattacctaaaatgttatgggtgaaggaacatgagcctgaactttttaacaaaaccgctgtttttctgcttccgaaagactatgtgagattccgcatgactggcgccattcacaccgaatactccgatgcggcgggaacgttacttttacatatgacccgcaaagagtggagcgatgagatttgcaatcaatttggtatttcagcagaaatttgtcctccgcttgtggaatcccatgactgtgtaggatcgctgcttccgagcgttgcggcgaagacagggctgctcgaaaaaacaaaagtgtacgctgggggagcagataatgcttgcggtgctgtcggagccggtattctttcttccggaaaaacgttatgcagcattgggacgtcaggagtcatactttcctgtgaagaagacaaagaaagggattttaaagggaaagtgcacttttttaatcatggaaaaaaggattctttttatacgatgggggtcacgctcgctgcagggtacagcttggactggtttaaaagaacgtttgcgccgaacgaatcgtttgaacaattattgcggggggtggaatctgttccgataggagcaaatggactgctgtacactccttacttagtcggtgaaagaacgccgcatgctgattcatctattcggggaagcttgatcggaatggacggagcccataaaagagagcactttttgagggcgataatggaaggcatcacattctctttatatgaatcaattgagctattccgcgaagcgggaaaatcagttgatacggttgtctctattggcgggggagctaaaaatgaaacgtggcttcaaatgcaggctgatattttcaatacgagggtggttaagttagaaaatgaacaaggtccggccatgggggctgcgatgttagctgccttcggaagcgggtggtttgactctcttgaagaatgtgcagagcagttcattcatgaagcagctgcattttatccaaaagaacaaaatgttcaaaaatataaaacactattcgagttgtataagaacatttacgttcacacaaaagatatcaatacagctttaaagagctttagacaaacctaattttcaggaggtcaaaggaagaacaataaacggccactcattatcaatggccttggttttataaatctgttaacaaatgagaaagccggcattaataaaccatggaatgcaattctttctcccgcgcaatacactaagcgattacagtttagggatatcaaagcagcggcagcgctaatataacttcaaatgtgttaacactattgaaggaaacagataagcattcttgtaagttgtgactgcatcagtctaaactcatatgacgatgaaatgagaagtatacacacaaaacatcccctcacattgcgtgggggatgttttttattattgagattttcctgtttcttgaatccgtggggatagcctttctgcaatggattcacaggtatcactcaacttcaggatttccttagaaaatgaagaaagaacctcgccaaattggccaggttctttttatattgcacaaaaacagacacggtgatataatcagaacacgcgcgctttctgtgttaaaagtcatagttatccatcttatattatgattatatcatgctgaaaagctcttgtcaaatttttttgaaggggagatatagaatgagttctttggttctcggcattcacgaaattgaaaaaacacagcctttgctcgttggaggaaaagggttacatttaggggaattatcaaaaattcaaggaatacaagtaccggaaggattttgtgtcacaaccgccggatatcgaaaagccattgaacaaaacgaaacgttacaagcgctgttgggtcaactgaccatgctgaaagcggagaatcgggatcaaattggtgaagtcagcaaaaaaatccggcaaaccattatggaagcagaaattccttcagatgtagtcaaagcagtcgcttgccatctctcccggttcggcgaagaacatgcctatgccgtacgttctagtgcgacagctgaggatttaccgcatgcctcttttgccggtcaacaagacacctatttaaatattaccggcgtcgatgcgatcttgcagcatatcagtaaatgttgggcgtccctatttacggatcgcgcggtcatttaccgtatgcaaaatgggtttgatcacagccaagtttatttatctgttatcatccaaaggatggtgttcccccaggcttcggggattttatttaccgctgatccgatgaccggaaaccgaaagctgctgtccatcgatgccggttttggacttggtgaagcactggtctccggcttagtatctgccgattgttataaagtacaggacgggcaaatcgtcgataagagaatagaaaccaaaaaaaaggctgtctatgaacgaagagaaggcggaacggaaacacgggagatcgatcttgatcagcaaaagattcaaacactgactgatgaacaaattttacagctggcacgtatcgggagacagatcgaagctcatttcggccagccgcaagatatcgaatggtgtttggaccgcgatactttttatattgtccaaagtcgtccgatcacaacgttataccccgttcctgaagcgaacgatcaagaaaatcacgtctatatctctgtcggtcatcagcaaatgatgacggatcccataaaaccccttggattgtctttttttctgttgacgactgctgcacccatgcgtaaagccggcggaaggctatttgtcgatgtcacacatcaactggcatcccctaatgtcagagaagttttcttaaaaggtatggggcagcacgatccgctcttaaaagacgcacttatgaccataatagagcgagatgatttcattaaaccgatacatgataaaacggcgccgattcccggcaaaggcaatgcagatatgccggatcaagctgaaaacgatcctgcaattgtttctgatttgattaagagcagtcaggcatcgatagaagagttaaaacaaaacatccagacgaaatcaggatctgatttatttcgttttattttggaagatatccaggaattaaagaatattttatttaatccaaaaagttcggtgctgattcgaactgcaatggatgcttcatcatggattaacgaaaaaatgaacgagtggttaggtgaaaaaaacgcagcagatacgctttctcaatctgtacctcataatattacttcagaaatggggcttgcgctattggacgtcgccgatgtgatccgtccttatccagaagtaattgcctatttagagaatgtaaaagatgatcactttttggatgggctggtgaagtttgaaggcgggcgggaaacccatgacgctatctatgcttatctcaacaagtacggaatgcgatgtgccggagaaattgatatcacaagaactcgatggagcgaaaaaccaattgcacttgtccctatgattcttaataatctcaaaaactttgagccaaatgccagccagcggaaatttgagcaagggcggcaggaggcgttgaagaaagaacaagagttattagaccgattgaagcaattaccggacggtgaacaaaaagccagagaaactaaacgaatgatccaaatcatccggaacttcagcggattcagagaatatccaaaatacggcatgatcagccgctacttcgtttataagcaggctttactgaaagaagccgaacaactcgcaaaagcgggggttattcatgaaaaagaagacatatactatctcacttttgaagaacttcaggaagtcgtacgcacaaataaattggattaccaaatcatcagcacacgaaaaggcgagtacaaagtatatgaaaaactatctccgccgcgtgttatcacgtctgacggtgaaatcgttacaggcgagtacaaacgagaaaatctcccggccggagcgattgccgggctgcccgtttcctcgggagtcatagagggcagggcacgggttattttaaacatggaagatgccgatttggaagatggggatatattagttacccctatactgatcccagctggacaccattgtttgtgtccataaaaggcctggtcactgaagttggcggactgatgacccatggagcggttatcgcgcgtgaatacggcttacctgcagttgttggagttgaaaatgcaacccaattgataaaagatgggcagcgaatccgcgttcatggaacagaaggctctattgaaatattataatagcgggtgtgtgcacgtcaccagatatttcctgcatattaactgacaaataccgaacaaaaagaaaagccggaaccttttagaagaggaatccggtttttttatgtgaaaatgatttaatgtgtgaacaccgcattttgtgggcggacccttacaaaaaagattcagtgactaaatctaacgatgacaattttataaaggtgagtaatatcctttttaagttcacaacctctgtaatcctgatgaattaaaaacgccttagttttttaacaactatttaggggttttgttcatgaacaagtctttattccgaattgaattgttcaccttattcttcatagcggcaatattggcgcaggcaggggagaaaactctcccgcttaccagagtgaaaataaaaaatgtttatcttagatagatttttttaaaaagtaaaaacgccataaaacttcttatggcgtctgtccgaactaagggatgcaatgtttgggagacgaatataaatcgtcaatgtgctagaaaaggaatgcagcacctacaatgattaacaaaatgaacagcacaacgatcaatacgaaagaacttccaccgtaatttccaccgtagttccccatattattgccacctcctgttgttaggatagtacataatatgccggacgataaatttcgacatagatttaagtctaaataagaaaaaatggatattaagtctaaaatgaagagcttctaagaatatgaaataatggaaagagagaaatggatgggacggtttgctgtttaaagaggagggatatggctcaacatgcaataaaactgtggatgaaagtggtgagccatgacgttacttcatcatgcagagccacatacgaagaggtacagggaaattatagttaacgaaaatattcatcatttcccgggcaagcgcagtatacgacaaatcaaaacaaatcacaaagggacggaaggtacgatacaaggaggctgcttgcgggtttgtggtgcagataaagtttccgtttcaaaaaggtcatatgtttattcgacactttacgtttattcctgcagaatgcttggaaaagaaagtcggcaaaactgccgactttcctaacggaatttagatctcaacagatctaaagaaaccatcgacactatcaccggtgccgctatcatatttcaggatgtattctcctttttggttaacgctgaattcttgaatgaacgttttccccgcatttagtgtcgtagaggataagagtgtattcccattaggataattaatggtgaatttgaaagatttgctgccgtcattcgctacaaaaactctgatttttcctggagagctgccttgatagttgaatgaaatcttaccggtaccgccagaaaaaggctgacacgcaatatacggagcgtcacatgaccaaccggcaggtttcatgactttatcttgatttggcaaagattttgcagaaacatctgcagcccccattagcggaattaacccaaaagcaagagcgccggcaataattttctttttcattcgtattcctcctcttaatagtgaatgtgatacagctataaatttacaatatttataaaataattccttctttttcaagttgagagaagaagaaaaatttaaagaggacaaataagtgtcacaaattaacaatccatgcactgcagtaaactggtcaaagcatgaagatgattttacgctaatgttttacaaggcgatcttctcactgtgagttaaagaacaagacgattgttaaccctgtgcgggtacgtaacaactgaaagaaagtaaattcccggacaaggagtatttctttaacctgaaacttttataaagcattaacgtattactttataaaggtaaataaggaggcttctgaatgggattaaaaaatttctttaatactgagttaaaatgctctatctgcggaaaaacattaaaatcaggggatgagataacagcttatcttacacttccgagtgagaagaagatgcctgtgggtagaatggacaaagtgttaagcaaacactctgataaggtctgctgtaaaaagtgcagtgagtaggtttttagtgttatgaggaacctctggtgggtttcctcataacagctacgcttcggcaatgaatgacctggaattatattggtatcagggttagtccaggcagtacttgcaaaatgtatgtccgccgaatggtctgtaaagtttcttttctgaactaaatgacaaagtcttattcagtctgggtggggcgctgagcaagaatagagattaaaggctgccgtatcattcccggcagccttaatgattaggaagtaaaatcgataaccatgcggccggtcactttaccttgctccatttcttcaaaaatatcattcacatcttcgatcgggcgttttgtcactttaggtacaactttaccgtccgcagcaaattgaaaagcttccttcaggtcttctctggtacctactaatgaacctactacctgaattccatctaacacaagacgtggaatatctaaatccattttgtccaccggtaaaccgactgcgactacacgggctcctgcttttacaacatcaatcgcttgattgaaaggggttttagagacagccgtgatgaccacagcatcaagccctaaatcgttagtcacttcttttgccttagcgacggggtcttcgtttaaactgtttacaaccgcatcagcgcctaagctcttagcaaaattcaatttttcatcgctaatgtcgaaagcaatcactttagcgttaaagacgttttttgcatattgaacagccaagttgcctaaaccgccgactccaaatacaccgatccattgacctggtttaatttcactgactttaaccgctttataagttgttacacctgcacaagtaatgctgcttgctgctgcaggatccaaattttccggcacctttattgcgtaatcgaccgctacgattgcttcttcagccattgcgccgtcaactgtatagccggcattttttacatcacggcacaaggtttcacggcctgttaagcaatattcgcagcggccgcagctttcaaacatccaggcaatagagacgcggtcgccctttttcaggcttgttacgccttcaccaatctcagtcacaatgcctattccctcatgacctaaagtgacgccggtaacatccccgaaatcagcatttttaacatgcaagtcagtatgacatacaccgcagtattccatcttaactttggcttcaccatgccgcaaaggacgtaattctttttgtacgatcgctatacttttgtcttttgttgctactactgctttcaaatcatacacccctttcaaatattcgcagaaaatttttacttatcttacaatttagcacacgactcttcttttgaaaacccttacatttttgcggacaagtgtctctacaaaaattgagggagctatgcagggaggattctacggatgatttgtcatccgaagggtgtttaaatgggggtttgtcatctccaaatgcacagaatgctttgaatttgcggtcataatctttctatagatatttgacttgcactgcagagaattacgccgtcaggatatgattttacccttagtgaaaagaatttcacgggtgatcatttgaacttgagcgcggctgataaggtgaatggtgatgcaaacagaaatcattacttattggtcacaaaaggagccggctgcggagatgtgtggatttcacggatttgaacacgatgagccggatgcagattggtgagcgatacacagtcaaggtatttccttgaccttttttatgggtatactgataattaaaagtaatcatagtatactaaagttacaataaaagtaacgaaatacaaattttaaggagttgcataaaatcattcttttaaagagaaggggatcaggttggatcagttaataaatcctacgaaacattctttttattttaggctaagtaaacatgactgttataaagttagaacaggaaagtgctccttagatttaactgataaggaatttaatgctttagaaggcgaagagcatgaatatgcattaaaatgcagaagattggctgcgcactacataaaaccggacatgcataaaaaacattcaggaatatatgcaagcgtaaatgcttgcggtcatatttcgtttagtgatggtcagcacaggatgtgtatctgcaaaaggtcaggtgtcgataaattacttattcatttatcaaacaacggagattatatatgtcatatatgccaggacaaaaacaaaaaattaacagttaaagaaaaattgaagcaaaggttttttaaaaaggattcgaataaacttgcaagagaaaatgattttattgatgatgagttttttgattaaaccaatcttttatttcaaatggaggggtacatttgggtatactcaactttttcaagaacaaagttaaaaatgaacaaaatgagaataaaaataataatatgaacactgttggcgttaataacgaaacagagatggtatcgaaaaaagaaaatttcccaatcttgattcaagagacaggcttctcaaggaaatatgaagaaaagtctgcatttttcgagtatatagactttaaggttgcaggaacatcacactatcaaaaagatattaagaaagccatcaagactgaggatgaagacagctttttcttcgatgaaaaatatgatggtatgacaaataaagagattctagaatcaacttttgatgagccgatatttatttatcataatttccttttctcaaattgtgaattgcggttagaagagaacaacaagtacgatccggaagctatagctgtctatgtaaatgattgcaaagtaggacatgttcctcgaaagaattttcaagaaggcaagaaatacatttacgatcagttaaagagtggtataaggcacccgatatcagcaagtttgtatggagggaaatataaagttaaccgcgatgatacaaagattgaaacaggagaaacagattataaaattgaatgtcaaatagtgattaaaacagacaaatagacaataaaactacgatattgtaagtgcgaagtaaatgaacggggcggtgacttgaagctgaattcaacaagattaaagagctatacctacacattggctttttcaagtttgtcgtatggtttgattttcgggctatatatgtttgtatactcgggttttgtgccaattgcattggttactgtagttatcattgctttttacgcattcattacttactttttgtttgctgttcctgtgcaactatggctaagaaagaagcctaaaaagtttagtttggttcatcttttcatttataccgcagtcgcttttttagctgtgttcttgttctggcacataggtaatccgtcaattgatttcacggttttcagaagtttcatttattacataatgagcattgctgctgcgttcatatattggtactgggactctatatttctgagaaattacaatgttcatcggaagtaaagctgatgtttccaaaagaaagcgggtgaggaaaaatggaatacattgagttgaccagggacaatattgatgacaatcatatttgctgtgcgttaggtacgaaacaatatgaggatgcggtaaatgaaaagaagagctggctcaaagatcggatgagtgatggcttggtgttctaccgcctaaacgaacgggccaaagtttttattgaatatttacctgcagaagaagcgtgggtcccggtaagcgcacctaattttatgtttattaattgcctttgggtctcaggtaaatataagaataacggacatgcaaaacacttgttagaaaaatgtgtgtcagatgcaaaatcccgcggtatggatgggatagttcatatagtggggaagaaaaaactcccttatttaagtgataagcatttcttcgagcatatgggatttgctgtgcaagatgaagcagaaccctattttcagttgatgtcactgacgtggaatgaacatgcacatcctcctgtatttaaaaaacaggtgaaaagtaattccgttaatgatgagggaatcacaatattttatacagctcaatgcccatttgcagtcggagtgttaaagcatttaaaggaactgactgaaaagaaaggacttcattttcaggccctgagaataacgtcaaaagatatggcgcaaaaatccccggcagtttggacgactttcagcatgttttataaggggacatttctcactcatgagatgatgagcgtaaataagtttgaaaaaatactcaataagcttttaatggcttaactttgttttattactattgctcgtttttatattcgatactgagggtttttcacgaaaattgttcagtactttacattgcgggcggcaaatgaatgattattgtttttgacaaagatgataacacccatcattatagtaaaaatagattgtgataagttcttcaacaaacgaagaagttcttttcaaaggtcgataacaatgaaacaggagactgcaaatgcaaaaaattgaaacccatcgcttaattttaagaaattttaccgagagagatgcacaaggtctgttggaatattcggcacatccgagagtgaattgttttcttgatgacagaatatctacgttagaagaagctgccgtaaatgttcaaaaaagaagccgagatgactcttatattgcagtttgtttaaaagacagtaatgatctagtcggagaactattttatttaaaagaagagccagatacctattccgtttgttggaatttcaatgcccgttttgaaggggcgggatacgcaagtgaaagtgcgaaggctttctttgagtatctctttatgcaaaaagaagcaagaaggctttatgcatatgttgaagatgataactgcaggtcacaaaaactatgtgagagattaggaatgcgtaaagaaggttattttcttgaatttatttcatttactgcccacgaggatggaacacctaaatatgaaaacacttaccaatacgcattgctaaagaaagaatggttaaaacaaaaacataggtaatagaatttgtggggaaataatctcccctttaccgaaaaaaccctgctgaaagcaggtttttttgtatttaggttacctagtaacgatcaaaaagattcagcttgaaggttgggaaaaacatgaaaatcattatagcaatgttgtaaaattagagagaggatgattgtgacggacattttgcagtttagcgacagaaggtgcaggaagtaatttgaatcagcaatgttcaattcattttgatgaatttaaagaagcgcttgataatcaaaatgtgaaaagcagttcagagtcaagacccattttgcggtgagaccggaaatatgctcttcatcttctgatgttgttcaaagctgacacctcttgatgcttatgtataagaaaataataccattgaaatatatgtataaggttggaaacggaggggatcaaagttggtgcgatcttgtgtaaaagaaaggaccaggatgaatgtgaccagcatccaccctgatcaatggggttcacagtgttctatttcattgtattccaatcggaataatattacaagggtgaaaaagaaataagcggaatgttttcggcttcttctgtctctggagcgggaaacggaaagtgagatgtttgaatgaaaataaatgattatctgaaggaaaggtttccgactttaaaattagtgcccggcatttatcatcaatgggacgtgggacttcatttttctctcggcggcaatatgtatcaatttaatgaaagcggtgctttgaatcttgagtattttcagcttgttcatcatcaaaccgccgcacttttcaatgaactgtttgaacatagcgatgacatgttccttgttgccaacgtatataagcacaaaactcaaggtaatcatccgagaaaattaaaggtttatcagccgtttctgaagtgtaaggatgatttatatcggatccaggtgaagacctgcccctgtccgtttgaagaagatgatgcagaagaatatgaaatgcagcagttttctttattatgtaaacggaaagatctgcgtattccccaattacttaaggcagccgtccacgaagattttccgctgaagccaaggttcgggggctgttccgttgggtatcccgatgttttctttgtgaatatgacaaaagatattattttctttctatatgatgacagagggtgtgaagtcatcgctcttgatgccggaagaataggaaagctttatgatcaatatcacgattggattgaattggactgaaaacgaacacatgaattcgaatccgcttgtgccggctttgttcttgcctagtccggctgcatgagtataatgggcagaattgaagggcgccggaaactttttttcctctcataccggccttctgcatgttaagcttctgtatttattttgaataaattcctatttataaaacggctgaatagaataacataaaagcttttttacacagtgcaggaggagagaaatgtgagggctgaacaccgtgattgtatggaaattggaatttattcatttgcagaattatatcccgatcctctgacagggaaaacagtcagcgcaaagcagcggatagatgaattgatgaagctggcgaaactggctgacgacgcagggcttgatgtattcggggtaggcgagcatcatcgtcttgattatgcggtatcttcgccgccggccatcttatcagcgatttcacagattactgaaaatattaagctgaccagtgccacgactgtattatccaccgcagatcccgtccgtttatttgaggattttgcaacgcttgatctgatttcagacggccgggcggaaatcattgcgggacggggcgcatttttagactcgtttcctcttttcggttatgacgtaggccattataaagaactgtttgaagaacacattgacctttttttaaaattaaattccggggaagaatcggttacctggaaaggacgttaccggccgccgctgcgcgaggcagaaatttctcctcggcctttttgcggaagcattccgctatggttaggtgtttcggggactccggaaagcgcagaacgagccgggcgtgcaggtgcgggtttggcattggctgtactgagcggtgatccgatgtcatctaagccgcttgttgacaaataccgggaagcggcttctaaagccggtcatcctccggaaaatgtgaaggttgccgtgaccggacatatgttcatttcaaaaacgaatgaacaggcaatacaagaattttacccgtatcattcaaattactggtctcacgttcattcatatcacgggatcgatgagcctttaacgaagaaagattttgagcgggcgtccggaaaagaaacagctttatttgtgggaagttcacagcagatcattgaaaaaatcatgcatcaatatgagttgttcgggcatcagcgatttctcgcgcaaatcgatataggaggtatgccgtttaaaaaagccgcggaaaacatcgaacgattagcagcggaagtagcaccggttatccgaaaagaaacccgcaaatccagcgaatgaagttctgagcataaggggcgggccggtttttggcaatcgcggattcgacaacagaatcggcccggctttttctttatgattataaaaaacaaaggggaaagcgcgaacctcattgctttttcctatcaagaaaaggaaggtcatttcatcctctatcgtgaagtgtatataccgaaagggattttattaacaaaaaagggaggatgatgcagtaatgaagggtttggtcaaagctgcagttttaactgttactcttgggattggaggcgctttctattcaagtgatgcatctgcgcacgggtatataaaagagcccgtcagcagagcgtacatgggagctttagagaaacaaacattgggctggacggccgctgcgcagaaatatggctccgtcattgataatcctcagtctgtagaagggccgaaaggatttccggctgcaggtccgccggatggaagaattgcgtctgcaaatgggggatcgggacaaattgacttcggtttagacaagcagactgcagattattgggtaaaacaaaacatccgcggcggttttaacacctttacttggtactacacagctcctcatgcgacatcaaagtggcactattatatcaccaagaaaaactggaatccgaataaacctttgtcaagagatgaatttgaattaatcggaacggtaaaccacgacggttccaaggcagatacgaatctgactcataagatttttgtgccgactgatcgaagcgggtatcatgtcattttgggggtatgggacgttgcggatacttccaatgccttctataacgtcatcgatgtaaaccttacacaataatctatgaattactgatcggctgcatgttcatcggccgatctttttagttttaatgtgtgaatgaaaagggtaaaaacagcagagcgccataaacatttcatttatggcgccgtacgatcatggaggtgctgctgacatggatgcggaggtaagaggattcttaataaccgccgaggaaagaagccccaacgatgattaataaaatgaatagcaccacgattaacgcaaaggagctaccataaccacctgagaatcccatataatctcacctcctaaagaggattaatacatactatgccgaaatgaaaagtttgatagggatgctagtttactttttgaaaaaaggtttcttagtctatatttcctttacatggccatccgttaaaatgagtaaaaggaggaatcgtactgcttcctgtaatagaaacggataggctcatacattgagaagttgcgaagagggtgcgcagttggcttgtttttttaaaaatgaaaatgtaacacgctattaggattggaaccttttgattcaacggaacaggctgaagaaatgattggttggtttcaagagcagcagcatgaaaaaagtggatgtgatgaggaatagagaaaaaagatgcgaaaggcataatcggaaccatgtatcaaaacggactgcctggtgatatacgcgtatactccattccgaatgggaacgtaacgatctaacagaagaacttcaagtgttctgcggtaaataaaaaaagccgatgaaggcttaaaattgattagacgctgtaaagcattctttttgctgcgctttctgcagacggagtttgattgtaagaaacgattccgatcatcactaacaagataatgaaaaccaatatgctccacaacactatttttaaagactttgacatggcataccctcactttgaaagactttaccggggctgcgatcggagcccgcacttcaagtatagtcgttataacggtgaaaaatgtacagtatcccgttatcaaaataaaaacttgcgggcgctgccgcaagttttctctgaattaaggtctgtggaattcaatatgctgattatcacgatcgaaccatcctctgaatgcccaattgatccagcccccgtctcctttgttattaaaggaaccgtcttcgaagacccagattccgtaagtaatgccgtcataaacggctgatccgtaaaattgaacgccgttaaagcggtcttcatattcttgatttaaattgaacaccatgacgttgtacttctgtcctgatgcgtaaaatgttgtttccatgacattttttacccagccggttcggttttgatctgacttaactgcttcagctatgcgatctgcgattccgagaacatctacgtttacgttcagcccggcatcaacacctgctgcttttacgttttggcctgctgtttgggataatttactttctaacggatttgcaacgggtgaaacgtgaggcgcattcgggtgttcagactgactggctgctgaggcactggctgtgaaaggaattgttagagataaagctaagcatgatccgactattgttctggcgattttcatgtctatgacctcctgaggaaattttttaaaattgttgcaaattcatggtatcgcagaaaaattgaccaagcaaagagcagattttctcaaaagtcatgtcattctatttatgttgttttctgtaaatgaaatacttttaatcaggcgaaaagggaagaaaataatagagtctttttatgtattgtgataggatgaccggattttgggtgaaaatagcccggagaaacgtcataataagaaaaacacccgggatttaccgggtgtaaaaagtattgatatgtcaagtcagcagcattttttgcattttcttttataaacaacgatgtaatcataatcaagatgctttttatcttgtttcttctttttcttcttttgtttaggctgctttggctggtgatcataatgtccgttcatatccatacccatgtccatacccatgtccatactcatactcatattcctccttttttcatctgacggtagtattctatgacagaaagcatggatggcttggacaaatgaaacggtatgctgaaaaagaggcatctcattcggtataaaaaacaggattatacccgcccgatagaaaagagagaagatgatcctgatattgagatcctatttgataaccgcaattgcaatgccgtaccctttttcagcgctgtataaggccgtcagtttcaataccttccagccttccgcggctttagtcccgattccgttatgagccgtgatataatctcccgggctgaccgtactgtcgactcgtacgtaatgccggccgttgagtccgacaatatgccattcgtctctggccgcgcgtgcttcatagtcagcttcaagagccggactgcagtccgggttttgtttcggtacgcgtactgtttctcctgtttcttcgtcagtcacattttcgtatatgaaaccgccgaactcatttgtcaaaaagcggctttgccatccgaagcttgcggctcctgagataaaagcggctgtttctgaaatgacgccgagcatataatcaccgacgtgagccggttcaattttttcgcctttcactgtgacgatcgtcccggcgggaatcttctggccggttacactttcaaaatattctccgtaccctgacagggaagaggtgacagctccggcgaacgtaccgtggccgcccgctgaatccagtttccatttgatggactgatgccctccggcaaccgtgtatggttcttccaatgtaatgctttctgatgacagaatcgttctggagactttgccgcccgtaatatggacattgtttgaagcggcgataaatgcccttgaaccttcggaacttgaacctccggaagagctgatgatcgcatttctgtcacctctggccgtaatatcgcctgttcccgcaataacggcgcttgtcgggttgaatgcaaaaccggagctggtcgcgagctgtgcgcctccctttaaattgacggggatctgctcataagtctgtccttttatagatgcggcagcgctgtaaccttccgcttgcaccccgagaatgacagcctgactgttaggggacgtaattccgacggaaccgccgtctccgatcatcgtaccgttcataatatttacgttatattggcctccgccgattgtgatgcctttaggagaagacttgtatatatcaaaatttaaaattttaacataatcggttttattagatccgccggatatattgatgtcaaccccggcttgtgtaaagccgcgtattttaatgccgttgatcgtaatattttgactgcggtattgaagagccacgactggattcccgccatagtcgtatgagggatcaccaatagctgtgaatccgtttacattaacgtttttataggcagagatgaccagcgccctcggggttacaccgtcatagagggcattgaataccggttcaatcgcggtgcaatcggttaaagtaacatcataagccgtcgtgctttcggggtctgaggcctgatgatggccgatatgacgaatatcaaatgaacgtacatcacgatacgaaacatgaccgataatatgaacattttgagaagccggccacaggctgtgcgcctttacctcaatcccgcggatatttccgctcgtatagttatttaaaagccacacatgtttagagccgtcgtcaatttcaatgccgttcgagtttgcgctgccctcagcatgctctgtgccgcgggggtttccggaatggcagttggaaatgaaaatatattcgctgtaatgggtggtaatgccgtcgtctccggcgccgtatgccacacagttatcaatccatatataacggcagccgtctttcgtccattctgtttcaggcaaatgatcgtaagtcggagatgtaatatctataccatgcagacccgcgttaaccgtttcaacattcttaatccagccgtattgcacattagcaaacgttaaacagctggaacactgtcctccggggttcctgactccgcattgacggtcaggattccagtctaaagtcatgttctggacaaaaatattacggtttccattttcgtaatcatcgttagtaatgacccattcgtatgcgggagtgtcctcatgaagcttaagcacggtaatcccttgtccctcaccggaaatagtagtccatgaggggagttttatcccttgaaccaaaaattctcctgcgggaacatttactttgacccggccgttcccgatcgcattccgaaaggcttctgtattgtcccggccgtcagggaccgctccgtaatcctccacattcacttcccgggtgattttattcataagcatttcgtattctgtatcaagccgttcttttaaaagtgaggtgaccattccttccgccgtcacccgggcatctgcgatctcaagattatcatccgttgcggaatgcttaataaaattctgcatccttgctttgagatgctccaattcagagggctgtgcagggcgagactgcaatggggcgtttaaagacggatcaggaaagtttttaaattgaaccattctaaagacacctctttcttttgatataagcgcctgaggcaggggacagaaaagaatcgcgcgccctttaagcgcttattcttcaaattctttattcagaacgaaattccttttgaaaccgaggcgaaattttaaaaaagctctgttgaaaggaacggacatatagctttgcattattgtaattgaagctgtcatgtgaaaatggagggaaaaactgataggaggggtcctcattttaggtttattctcattgtcttcgccgtgcttcctcttcggctgcatatacaccaaaatcagcattcttatcagttaaatggtataatggggcacggattggtcatcaatacgactgaaatagggaagcaaaaggagcagcgaacatgactttacaaatcaaaattaaatattcagatgatacgcaaacgagaatcagtaaaattgaacagggcgattggattgatctgcgggcagctgaacatataacaatcaaaaaaggcgaattcaaacttatcccgcttggagttgcgatggaactgccggaaggatacgaggcccatgtcgttccgcgttcaagtacatataagcatttcgggatcattcagacaaattcaatgggagtcattgatgaatcttataaaggcgacaatgacttctggttttttcctgcattcgcgcttcgggataccgacatttccaagggggagcggatatgccaattcagaatcatgaagaaaatgcctgaagtggagctgatcgaagtagacaagctcgggaacaatgaccgcggcggactgggatcaacaggcacgaaataaaacgaaaaaaagactgcttaacagcagtcttttttttatggagacagcagttacattcaaattttttcggggattcttgaattgggaaatcaaacaaaactaaggagacgggtttcatttttatcatttaagctttccgtctctttgaacagaaagacttttttaggctaaaggatagaggttgttttgatgtttttattcttcaagatgaacggaggttttgtccaacgtatataatattgtgacaaaagtgtaaacaaaagaaaggatgatgttatggcaaaaagggttagaagagtagaccgtaaagcagccggcaaagaggcagagcagaagaaaccgtccaaagtcaccctgttctgccgttcgcttcaaaggctgaagcatttgtattgtaacataaacatacaaatgccatcaataaccaaaaaaggaatttcaattttaattttaccgtttttgcttctgccgttctttcgggctgatgccgcttcagatctttacggcagtttcgaggaattaaagctgaatgaagatccttccgatttttccatttcaacgcgggagcatgacccttctgtcctcatattagctatacacggcggaggcatagagccggggaccagtgagttagccagagaaattgccgaaaaccggagtttatatttatttgaagggttaaaatcagccggtaatgcagctctgcatttgacaagttcgcatttcgatgaaaccaaggccgtgcaaatggtgaaagggcactctaatgtcatttcattgcacggttacggcagtgatgataaaaagataaaaatcggcggtacagacagagaacgggccgaactcttgaccgatgtgctgaaacggcacgggtatcctgccgttcttcttggcacaaatgataaatacgcaggcgtcagtccgaacaaccttgccaatcaatcttcatccggattgagtattcaaatcgaaatgagcaccggcttcagaaaatcactatttgacacctttacgctgaaaagcagagcatccgcacaaaacgggaccttttaccaatttacaaaaacgatttctgattttatcagtgacaattattaataagcacgcttattttgtcggcggggctttttcttttgaaatttatgaaactttaagttcttaagatcgtatacataattgacaggatgaaagaaaagaggtgggcaaatgaaagtgatgatcgggtctatcattcttcttgtcatcatcggattcggtttatggctgatgcttagtccaatctttaaacaagtgggaagcggagccaaaaaattaaaaaagtcatgggaggaagaagatcagcatgagcgaaaataagcgcggaaacacaaaaaaaattctcggcggtgtgattataggtgcagcccttttaattgcgggcgtcacagcgtcactattcattgaaaaaataccgaacggttatgtcggggttgtatactcaccgaatggcggggtaaaatccgacacattggaccaaggctggcacttagtcggattatttaataaagtaacggaatatccggtgcgtatgcagacagtgaataatgaaaatataaaagtggcaacctctgatggtaaaaatatagaaatggatatcgcttacaactatgtcgtgcagcctgataaagtagtcgatctgtttaacaaattcggggcggtagacgtcgaaacgattgaaaatacatatttaaaaacaaggctgtgggatgcggcgcgaaaatcaatcagcaaatactcggttattgacacatacgggcaaaaatctgctgaagccgcggccgatgttcaaaagagatttgctgatgatatgaagagtctcggatttttaattgatgatctgacgcttggcgtaccgaagccggataaagccacacaggaagccatcgatgcaagggtgaagtcttcacaggaacttgaacggacacaaactgaaattaaaatagccgaagccgaagcgaaaaagaaaaaaattgaagcggaagggatcgctgactataacgaaatcattaagaaatcaatgtccgatgaaatgatcaaatataaatggattgaaaaatgggacggaaaaacgccgaaagcgacaggcacagactcactgctgcagctgccgcttgacgatcagaagcaaaagtaaaaagaggaggaggcgattgcctcctttttatgttttttcctgagggtctttttccggcactaattcttcagacgcctcggtttgatagctccatagcgtgctatccgtctctgttgtgtccttataatcttcgggaagtacatattgctgcaaataccggtgaaaaaatgcctcaaaaacagaaatgcaaagtgcagagataaccgctgccgcggcaggagagacattaaacccgccaatgttcatcaggaatatccataatataatgaatgaaattccgaaatcagctgcaacggctgtgaaattgcttgttctcggcagaatcatgcaatcacccgcaaaataagtgattaaacttaagatcactgtaataaacagaacgtttaaaaaggttacttggtacataagatccagaacaatgtacagtaaagcaagtgtgagcgccgttttagaagcgaaagcaattacgtgtttcatttgaaccaccttcgttatttcgtttagtcttcattgtaagcaatccgcaaatttttaaacaggtatatagtggttataaagtaaaatgtgaatagacatcacaggattcacaagttaaaatatgtaaaaagggggatgcaaatgaaaaaatactggatatgtattgctgtttttttattatgttttagcggaatacactcagctaaagcggctaccactgaattcggatcaaaaacaagcttcactttggagggaaacgcaaaagagtttcatattgaaaatccgggtgctgtagctgccgacgattactttttaggctataagttcaccataatgaacaactcttcgtgcggtttaagcatgaaactccagcggatggcgctgaacggaaatttttatacattaagttctaaaaactacagcggcagctggttaaacctcagtgcccaagataaaaaatcaattgatccgtatcacaaatacaggattctggttgaaagttcttcaaacgtctgtggtcccgtctatattaaagggttctacggtgtagaatattatcattttgattgaaaatagatactcgctaaaggcagcgggtttttttatatttatatttaacttattgcactatgtactaaatattcatatataaattttttgacgtgcccgcccaaagaaaagataaaaaagcaaattcatcacgcacaaatatataaaaagttgaaaaatgaatgaaaagtttctcgagggaaacattattagttgacttcaaaagtgcgatgtcggataataagaatgtaagtttttcctccttagcaggttcgtttcttaagccagggcgaatctgctttttttatgcaaaaaaaccccttacagaggggttttttacgataaatgaagtttaatagaattaatggacggctctgaatacgccgatcactttccccaaaatgcttacgttttgcaggataatcggctccatcgtcggattttccggctgcagccgcacataattgtcttctttatagaagcgcttgaccgtcgcttcatcatcttcggtcatagctacgacgatttctccgttattggccgtgttctgctgtttgacaatgacgtaatctttgtcaaaaatgccggcgtcaatcatactttctcccatgatttctaacataaagacatgttcgcccggaggaaccatccggtcaggaagcggaaaatactcgtcgatattttcaacagccgtaatcggaatacccgccgtcactttcccgatgaccggaacgtttacgacctggcttttcggaatatggacttcttcttcatccaatacctcaatcgccctcggtttcgtagggtcccgtctgatcaggccttttgtctccagccgcgccaaatggccgtgcacggttgaactggaagccagtcctactgcttctcctatctctcttacagaaggcggatatcctttcgtttttacctcttctttaataaaacgcaggatatcaagctgcctttttgatagcttcgtcatatttcgcacctcaaaacgtcgattttaagtagattatagcatgattttcctgacagtacaaacataggttcgaaaaaaacgattgacagaaacatttgttcgtatatactgaaagatataaaaagcgaacaaacattcttatcggaggttgtttacatggcgaaagaatctatcatatttgtcgggctgtttactgcgattttaagtgccgctattttacttgtttcatgtgcgggaaatgatcagtccctcagccaatatgttaaaataaaggttcaggacggcgatacactctggtcacttgcagatcatgtagcagaaaagaaacacattaataaagaagatttcattgagtgggtgacggagaataatcatctccagactgctgatataaagcccggagacgaacttattctaccggttaagaagaagcatccggccgtatatcagctggccattgtcaattagagaggaaagagagaaatgaaggcgctcatttatgcccgcgtaagcacaaacaaagaacagcagcaaacgtcattaaaaagacaggaagaggagctcagtgagatcgctgctgcaaacggcatggaagtcgtgaaagtcatttctgagaaagccagcggttacgaaatggaccgcgacggagtatttgaaatgcttgatgaaattaaaaaatcacatattgacgcgatattggtgcaggacgaaacgagattgggaagaggaaacgccaagattgcgcttttgcattgtatttacagggagaacgttaaaatatatacgacggctcataaaggtgaactggagctttccgaagctgattcgatggtacttgaaatcgtcagtattgttgaggaatatcagaggaaaattcacaatatgaaaatccggcggggaatgaaaagagccgtgaaaaacggctacaagcctgaacggaatctgaaaaacagacatgaaaacagcggaaaagaaaaaaaagaggttccggtttcggaaattatcaggctgagagccaacaagcttacctttgcagaaatcgcagcgaccttaagaggattcggctatgacgtgtccaaagccacggttcaccggcggtttcaggaatataccgcagacacagaaggcagctgacgcgcatcagttgtaaaaaagactgcgttttagtagtatataatcaacacgcaccaaaggagcttattatgatttctaaagaaaaaatcgcaagaattaacgaattggctcaaaaagctaaatcaaacacaataacggatgaggaaaaagctgaacagcaaaagcttcgccaggagtatttgaaaggattccgctcctcaatgaaaaatacgttaaagagcgtaaaagtgattgatccggaaggcaacgatgtcacccctgaaaaattaaaaagagaacaacagaaaaataatcttcactaaacagaaagaatacggcaatacgtattcttttttcgtatatactaatatcaggatgtgctttacgacaattttcaacaagtttatctcaaatttaagctgaaagagttgagaaaaagtcagcatcgctttatgatgaaaaggtacaacaataaggaaggggattataatggatacaattgaaaagaaatcagttgccaccattcgtacactatctatagacgcaattgaaaaagcgaattccggacatccgggcatgccgatgggagccgctccgatggcatacacgctgtggacgaaatttatgaatgtaaatccgcagaatccgggctggtttaaccgcgaccgctttgttttatcagcaggccacggttcaatgcttttatacagcatgctgcatttaagcggatatgacctcagcattgaagacttgaaacagttccgtcaatggggaagcaaaacaccgggacatccggagttcgggcatacagccggagtagacgcaacgaccgggccgcttggacaggggattgcaatggcagtgggaatggcaattgcagaacgccatctggctgagacatataaccgtgattcattcaacgtagttgatcattatacatacagtatttgcggagacggcgatttaatggaaggcatttcttccgaagccgcttctcttgcaggccatcttgaattaggccgcctgatcgtattatacgattctaatgacatttccttagacggcgatttagaccgatctttctctgaaaatgtaaagcagcgttttgaagcaatgaactgggaagttctttatgttgaggacggaaacaacatcgctgaattgacggctgcaattgaaaaagcgcgccagaatgataaaaaaccgactttgattgaagtgaaaaccacgatcggtttcggttctccaaaccgtgcgggcacatccggcgttcacggcgctccgttaggactagaagagagcaagctgacaaaagaagcgtatgcttggacgtttgaagaagatttttatgttccggaagaagtatacgggcatttcaatcaagctgtaaaagaagccggctcgaaaaaagaacaggaatggaatgaactgttcgcggcttataaagaaaaatatcctgagcttgctgaacagctgtcactcggcatgaaaggcgagcttcctaaagactgggatcaggaagttcccgtttatgaaaaaggcagcagccttgcttcccgcgcatcttcaggtgaggtactgaacgggatcgccaagaaaattcctttctttgtcgggggatctgctgaccttgcgggttcaaataaaacgacaatcaaaaatggaggagacttcacggccaaagactacgccgggaaaaacttctggttcggtgtccgtgaatttgcgatgggcgctgcattaaacggaatggcgcttcacggcggcctccgcgtattcggcggcacattctttgtattctctgattatttaagacctgccattcgtctggcatcattgatgggactccctgtcacttatgtattcacgcatgacagtattgccgtaggagaagacgggccgactcacgaaccgattgagcagcttgcttctttacgcgcacttcctaacctttctgtgatcagacctgctgacggaaatgaaaccgcagctgcatggaaggttgccgttcaaagccaagatcatccgacagctcttgtattgacacgccaaaacctgccgacgattgatcagcaggctgaagaagcgtatgcgggcgtggaaaaaggggcttataccgtttccaaagcaaaaaccgattcaccggacgcccttcttttagcgacaggctctgaagtcggacttgcgatcgaagctcaagcgaaactggctgaagaaaacattcacgtatctgtagtcagcatgccgagctgggaccgctttgaaaaacaatcggctgagtacaaaaacagcgtgcttcctccgaatgtgacgaaacgtcttgcgatcgaaatgggttcaagcttcggatggggcaaatttaccggtcttgaaggagacgttctcgcaattgaccgtttcggtgcttcagctccgggagaaacaattatgaaagaatacgggtttactgcagaaaacgtagttgaccgcgtgaaaaaacttctaaacaaataacgagacaaaagaggatgagtcaaatcatcctctttttcctgtttatgcgacaaaaatagaaggggcggcgtaacagtaatagacaattctttcttttctccttttgtataatagaaagcaataacgaagcgctgtaaaaggggatgaggaaatggaacgtcattactatacgcacctgataaaggatgagtttgcgaaccactacttcgggcgggaaacggctatgtttgagttgtttcgagactatcattggacagatctgacaccccaggaatatcaaatgacagaaaagcaagttcaatatataacggaaccgattccggtgatacatatgcatcagcggctccagctgcatttaaaccgaatgagttacagccgtttggattccatttaccggcttacactgcccggagaaaagggccgcgccaccttcatgatgaaagacagtttaattgagattgcggcttcgggagattatgaggcggaaacgattttctttgagattctgcgtaaaatcagcccctgttttcttgcaatggatttcaagacacggcgctacgggtggttaaatccggtcagggaaagaaattttgtctaaaaacgaggaaaaagagatgtaaatgttgtataatagcctttggtttagtacactttaaactagacaacatgaaggaggaaataaaatgactttatgggttggcatcctagtgggcgttgtcgcattgctcataggtgttgcactcgggttttttattgctcgtaaatatatgatgagctatttgaaaaagaatccgcctattaatgaacaaatgttacgcatgatgatgatgcaaatgggaatgaaaccttctcaaaagaaaattaatcaaatgatgaaagccatgaataatcaagcgaaataatacgtacagattatgatatagagatacatggttataaaaataaaaaacccggagagggttttttatttttgcgtcatgtttcaccccaactgccggtgtgcagttctttttggtattgtatgagaaggtggtcaagctcctggctgagttctatcgtaatgtttgatgtcattccgtttgtcatgacgattttaagcagctctgcccgttttttttcaatttcatttaatagatgctctctaatcacagggatatatcctttcatacataaatctttcacctgagtcgctattattatatccacatttatactgtttttcaaataagaaggagtataatatctcgatgtcaaattaaattatataagctttttctataaaaagtaatccttctcgggaaagtgttaaaaaaatgaaatgattttgtcataactcgaagggagtgtgtcatcgtgagttttaattactttctgacgtttggggccggatttctgtctttcatttctccatgctgtctgccgttgtaccccgcctttttatcttacataactggtgtcagtatggacgaggtgaaaacagaaaaggtgatgctgcaaaagcgtggcctcgtgcatacactttgttttttgcttggcttctccgtgatttttatcgcattgggatatggaacttcgtttatcggcagtttttttacccaatatcatgaagcgatccgccagtttggcgctatcatgctgattcttttcgggctgattactgccggtgtgtttcagccgaaattcatgatgaaagagcggcgcattcactttaagcgccgtccggaggggtttatcggttcggttctgatcggtcttgcgtttgcagccggctggtcgccgtgcagcgggcctattttaggagccgtgttttcgctggcaaatacaaatccttcttcagcagtgccgtatatgtttttatatgttctcggttttgcgattccttttcttgttctttcattttttattaccagaatgaattggattcgcaagcatcagctgcttatcatgaaaatcggcggcattcttatgattctgatcggagttatgctgttttttaactggatgagctacattctgatcgttctgtcaaatcttttcggaggatttacgggtctgtaacggattaataacttttgaactattatataccctttcgtttttggtacaataagactagttaatgttaaatatgtggaggggaatatgacacgagttttagttgtagatgacgccaagttcatgagggcgaaaatcagagagattctggaaacggcgaattacacagtggccggagaagcggctgacggcgaggaagccctggcagtatatcaaaaaatccgtcccgacctggtgacaatggatattaccatgccggtcaaaaacggtatacaggcgctgcaggatattttagcttttgacccgaaagcccggatcatcatgtgcaccgccatgcggcagcagcggatcgttctggaagcgattgaattaggcgctaaagactttatcgttaaaccgtttgaagcatctaaagtgctggaggccgtaggccgggtaacgggaacgtaaacgtgttctcttttcaaattggttttttttatgtttttggagtatagtatatagtatcaaactccgtgcaagcaaaggaatgataaagatgatgattataatttcatccgttattgcagcggccatggccatttccgtgatgatcgtcaggattaaagcctccgacaagcccgcttcacctaaaaaaataattctcccgccgattttcatgagtacgggagcgcttatgttcctttttccgattttcagagtgacgggcgaagaatttttggaggccattacgctgggcgtgatcttctctatttttctgattaaaacatctaaatttgagattaaaaataatgaaatctatttaaaacggtcaaaagcgtttgtgtttatcctgattggtttgctggttatcagaatcgctatgaaatccattttgagcacgacgattgattacggagctttaagcggaatgttttggattctggctttcggaatgattgttccgtggcgcatcgcgatgtttatgtcttaccgcaaactttcgaatgaactgaagaccgctgatattcagatgaattaaaacctttccgtccgccggaaaggttttttatttgagcagggcctgataaggagtaagatcaatctgtttttcgcggagatgcttttttaaaaattgatgatcacgcttaggagtggccagtatgtaacccctgatgattaaatcacgatttatttgttcagcttcctccgctaaggaaagttcaccgatttttccggcgattttcgctttggctacatcccgaaagagctccggcacgggagcgaccaattcatccaaaaacgccttgtcacccgcattccataagtgcctgcttttttcaatataatagtcctgccaatccagttctgaccggccgtcttctttcggtaagcgttttaaaaattttcggaacataaaaaatccgccgatagacagcaatccgatcatcacgatgacccaaaataaaataaaccacataaaccagccttctagcattgttctatctcctccttactttaaccatattgtaaacgaagacagaatagaagaacacatgaaaaaaagaatagaaaaaatgatagatgtccagtcaattcggttgctagaacatattctatcgtatagtgattctgctatttggccatgggagattcactttgagggtatatgactgatatgaccggacaaaaaagccgcttccattgagggatgaaagcggcttttttatgttatagaggaaattgaaaggaaaatgaggcaggagtctcattaggctccttgttcatggagacggtcagaatatggttggtgaaatcagtgaaaatatgtttgtcattcagataaaaaggaagcaccatttgtttgtttaatgtccgttcaagcgttttaacagagagcataaactcatttcccgaaagagtgacggtgatcgcctgcacctgcttcagggccgtcaggtcggcttcaatgatatactgacggcttgtttcatatagatcgatcggcagcgtctcgtcataccaagcatacgggtcctcgtaaaactgccgcagccattcttccgtatcatcaaattcttcagcgttttttgagtgattcatggaagcattcctccatattaaaaagccttgctataacgtatgcagaagctttaaatgggtgaatggcacaaaaaaacagacaccggggtctgttttacatatcgtggcttgtattatgtttttgtcttgtatggttgcggtttttcacttttttgcttccgctcagcggttccggctggccggggttatggcccttcggagcatttttatgcatatctttactcgtatttttatttgtcatgttaaagcctcctttttaaggtgttccggctattggtttgtttttctttttttattgttctgccgttcttcttccgtcaggacgagctggtcattttctatataacccgcgcctttgccttggcttttcgcatcattcatgccgttaattacatgattggctttccgttttaccatgatcatcacctcaacattaatatggctctttacagcccgttgtatgaggcggaaaatcggacaaaatttaccgaaaatatgctgataagacgatcttattgtatttaataaaaacattgatatttacttatgtatgattttatactaagatgaaattgtgagaaaattgtgatggaatgtgaacattcatctaaagaacgatcttgatcattgaagggggattttggagaatgacaaatcagcaaaaagtcgcaacacaagacgttttccaagcaagaaaaacattttcttcaaatgggaaaacatacaactactattcattaaaagcattggaagacgcaggggtcggcaatgtttcaaaacttccttattctattaaggttcttttggaatccgttttgcgtcaggtagacggacgcgtcattacaaaagagcatgttgaaaatttagcaagatggggtactgctgaattaaaagatatcgatgtgccgtttaaaccgtcacgggttattctgcaggactttaccggcgttccggccgtagttgacctggcatctttaagaaaagccatggcctctgtcggcggagaccctgataaaatcaatcctgaaattccggttgacctggtcattgaccactccgtacaagttgacaaagccggtacggaagatgcgttagccattaatatggacttagaattcgaaagaaatgcagaacgttataaatttttaagctgggcaaagaaagcgtttaacaattatcaggccgttccgcctgcaacaggtatcgttcaccaggtaaaccttgagtttttggcaagcgttgtccatacgaaagaggaagacggagaacttgtgacctatcctgatactttggtgggaactgattcccatacaacaatgattaacggaatcggcgtcctcggctggggtgtcggcggtattgaagcggaagcgggaatgctcggccagccttcatatttccctgttcctgaggtcatcggcgcgaaacttgtcggaaaattgcctaacggaacgacggcgactgacttggcgctgaaagtcactcaagtgctgcgtgaaaaaggcgtagtcaataaatttgttgaattcttcggtcctggtgttgctgagcttccgcttgcggatcgggcgactattgccaatatggcgccggaatacggagcgacttgcggattcttcccggttgacgaggaagcactttcttacctgcgtctgaccggccgtgaagaagagcagatcgatattgtggaagcatactgccgcagcaacggtttattctatacgcctgacgcggaagagccgatttttacagacgttgtggaaattgatctgtcaaaaatcgaagcgaacctttcaggcccgaaacgtccgcaggatttaatcccgctttccgttatgcaggaaacgtttaaaaaacatcttgtcagcccggccggcaaccaaggattcggagcggatgctgctgaagagaacaaagaaatttcatttaaacttaacagcggtgaagatgcggttatgaaaacaggggcgattgcaatcgccgctattacaagctgtacgaatacatcaaacccttatgtattaatcggtgccggattggtagccaaaaaagcggtagaattaggcttgaaagtgccgaattatgtgaagacttcacttgcaccggggtctaaggttgttactggatacttagtcaactcaggtctgcttccttacatgaaggagctcggctttaaccttgtggggtatggctgtacgacatgtatcgggaactccggcccgctttctccagagattgaagaagcggttgctaaaaatgacctcctgatcacttctgtcctgtcgggtaacagaaactttgaaggccggatccacccgcttgtcaaaggaaactaccttgcgtcaccgccgcttgttgtcgcatacgcattggcgggaactgtaaacatcaacctgaaaacggatccgatcggcgtcggaaatgacggacaaaatgtttatttcgatgacatctggccgtccatggatgaaatcaattctctcgtcaaacagactgttacgccggaattattccgcaaagagtatgaaacggtatttgacgacaaccagcgctggaacgaaatcgaaacgacggatgaagcgctgtataagtgggaccaggattccacttacattcaaaacccgccattctttgaggaaatgtctgtagagccgggaaaagttgagcctttaagaggacttcgcgttgtcggcaaattcggcgattccgtgacgactgaccatatttctccggccggagcgatcggaaaagacacaccggcgggcaaatacctgcaggaaaaaggcgtttctcctcgtgactttaactcttacggctcacgccgcggaaaccatgaagtcatgatgagaggaacattcgccaatatccgcattaaaaaccaaatcgcaccgggtacagaaggcggctacacaacacattggcctaccggggaagtgacatctatttatgatgcctgcatgcggtataaagaagataaaacgggtcttgtcgtcctggccggaaaagattacggaatgggctcttcacgtgactgggctgcaaaaggaacaaacctgctcggcatcagaacagtcattgccgaaagctttgaaagaattcacagaagcaacctcgtcttcatgggtgtgctgccgctccagttcaaacagggcgaaaacgcggatacactcggcttaaccggtaaggaagtcatcgaggtggatgttgatgaatctgtacgtccgcgcgacttgctgactgtcagagcaatcagtgaagacggtacggtaaaaacgtttgaagtcgttgtccgttttgacagtgaagtggaaattgattactatcgccacggcggcattttacaaatggtgcttcgcgataaaatgaaacagtagcagaatgaacaaaagagagaaagcagtctgctttctctctttttatgcgggaggcttaagatgcttgcgaaatggctgggcggaatgttacttatcgggttgttagtatatgcgggctggaacatttattccgtgcaaaaaagtccgaaagaagggacagaagaagggatgaaagcccctgactttacacttgatacattgtcaggaaaaagtatctccctatctgattataaaggaaaaaaagtgctcctcaatttctgggcgacgtggtgcaagccgtgccgaatggaaatgccggatatgcaggagctgcagaaagaatatcctgatattgcggtagcagccgttaattttacgtcttctgaaaaaaatatacaggctgtgaaatcatttgctgatcattatcagctgacctttcctattctgattgacaaaagcggaattaacggggatttcaacgtgctttcttatccgacaacatacatattagacgaaaaaggaaccattcagcacattcgcgtaggcacgatgacaaaaaaagaaatgaaagaaaaactggatctcaaatagaggttcagtttttttattgtgaagggcttaggttttgaaaaattggaaaaaatgaatgaaaacacggaggtgagaagattgaaaaaaatgcgaaaacgttcttttcatgaattggttatggaaaataaacgtgagctgatgaccaatacggaatatttgaatcagcttgaagaaaagctggagcagcggttcaaacaaaaataacctttaatttgcagtcatgtttgcacctccttttgcaaaatatactcttaaggagggatgaacatgggcataaacaagaaagacggccagccgcaatacgctccgagccacttagggacaaaacccgttaaatataaacgcaacaaaggggaaaagtttcatgacaagtcaaacggacatccgattgtcatgcagacgaaaggcgaataacatcatcaaaggagagcagacattatgacaaacaatgatcaaaaaccgaatccggatgaccgttccgataacgttgaaaagctgcaggatatggtgcagaatacaattgaaaatatagaagaagcgaaagaatcaatggaatttgcgacagatgaggaaaaacagcgcattcaagaaaagaatgccagacgcaatgaaagcattgaatcgttccgcagtgaaattcaggatgaatcggctgcaagagaaaacggctatcaatcataataaaaaccagggaaacctggtttttttctctttccggctcgttgtgataaaatggggctaatctgataaaaagggagcagagaacgttgcatgtgtcaaaaaaagaaatagaagtgcgttatgcggaaacagatcaaatgggcatcgtctatcatgccaattacttagtctggatggaggtcggcagaacggcgctgattaaggaactcggattcctttacaaggatatggaagatagaggagtgctgtcccctgtattggatatcagcatttcttataaaaagccgctccgctacggtgaaacggctgtcgtacatacttggattgaagaatataacggatttaaaaccgtttacggctaccacatctataatccggatcaagaacttgccatcaaagcgacatcctctcatatatgcgttgataaagagagcttcaaaccgattcagtttcgcaaggcttttcctgattggcatgccgcttacgaaaaggcaaaaaaataaggagcggctgcacttatggcatttggaattacgcgtaaggaactggaaagatggaagcaggatgtatcggaagggaaaatcgcttttttaacgcattactggctggacgaccgctttccggaggctaagaccgtgacgaaggccggttcaagcgatctcaataaactgatcagatggggagcggagtacgggctgaagccggagtggattcaccataaaaatgaatttccccactttgacctgctcggagaaacgcaaagaagcatattagaaaaagaacgtctgactgatcacctaaaaaggttcaggctgtaaaaaaaagaacgcatccgctgcgttcttttttttacacgtaatcaaataccggctcttctgcctgatctgaatatgtgactgacaaatcgtgattatcaaagtaccataagtcgctttcttcaataaaaaaggtaatgccttcaacttccgtgctggtgccgatgttcatcggcaggtcttttaaaatgccgagagaaaagcctttctgaacgttgctgcatcccccgtaacggacaaagaaacggacatggtcgcctgtttccagatcgagctcttctttgtaccaatccagcgcgcctttcgttactttcatgttcatccggaacactccctttttgtttctcatataaagaaattatctctattataaacgcatatggcattttgatgtcaaaattgaagtttcatcaaaaccatttgatcttcggttctgttttgtttataatccgtttgatgtttgccctgtgtctgtagataacaaacgcggtcaagagcgtcactacgattaataaataagggtcttttacaaacagacagtaaataatcgtataaatccctgttaacattgaagacagagaaacaaatttcgtaaggaataaaaatacgaaaaatactgcaaccatcgtaacgaataacagcggagcataaaacagcaggacgccccctgatgtggctacggctttgcctcccttaaactttgcgaacacggggaatacatggccgatcactgctgccacccctgcgagaagaggatgaatggggacgtgcagtaaatatgggagcgccgcggccagggtgccttttaaaatatcggctgcgacgacgacagatcccgctttaacgccaagcgtgcgaaaagcatttgtagcgcccaaattgccgcttccgtgttctctaatatcgatccctttcgcaagtttgcctacgactaaacctgacgggatgctgcctattgcataggccaaaataatcaataaagcaatcaacatctacatttctccttttcaatgtcccttcactctattttaacacgagttgttaccgtctgatgacaagttttttgagaattaagctgacaaatcgctttttttgattccggcgaagcggtcatgtacaatatatcaaaaggagatggtaaagatgcaaaatccttcaaaatcagagattaaagaaattctggaccggagcaaacggatcgcggtcgtcgggctgtcagatcgtcccgaccggacttcttacatggtttccaaagcgatgcaggatgaagggtatgaaattattcccgtcaacccaacgattgatgaggcgcttggcgttaaagccgttgcttcattaaaagacgtggagggaccgattgatatcgtgaatgtgttcagacgctctgagcagcttcccggcgttgctgaagaatttttacagacggacgctcccgttttttgggcgcagcagggccttgcaaatgaagaagcgtatcgcatgattacagacaaaggacggacggctgtaatggatttatgtataaaagtcgcccgcgctgttataaaataggaacaaaaaaggcaaaaatccttggcaaatcaggggtttttgcttttttattgaaagaatactctttgcgtatgatgatgaaacagatacaataaagcatgaacagcttttttagaaacccctttatacaggggtttgcagtctgtttgcgatggccggcataaagctatataatagaaagcgaactcatgttcttatctgccgaaaagggcaccaaaaagatgaaaagccgttcgaatgtatgtcttgcggcctaaaaaacgagccattcgcttaaatatgttgcgaaatcaagcatattggttataattgtgagtccgaggagaattggaccgaagcttgcgcatactgaaaaacaaagacatgaaaacatttaaaaaagagaatgattaagagcaggttttttgaaaggggtttgtacgtttggctagaaaacagcaatttgattacaacgaagatgccatacaggtgcttgaaggcctggaagccgtcagaaaacgaccgggaatgtacatcggttcgacggacgcacgcggcctgcaccatctggtatatgagatcgtcgacaattccgtcgatgaagttcttgccggctacggagatcatattatcgtaacgatacataaggacaacagcatctccgttcaggatagaggacgcggaatgccgaccgggatgcataagctcggaaagccgacgccggaagttattttcaccgtgctgcatgccggggggaaattcggacagggcggctataaaacaagcggcggtctgcatggtgtcggcgcatctgtcgtaaacgcattatcggagtggctgacagttactattgagcgtgacggatatgtctataaacagcggtttgaaaacggcggcaagcccgtgacttcacttgaaaaaatcggaacgaccaaaaaaacgggaacgcttacccattttaaacctgatccgtcaatgttcagctcaacggtttataattttgacacgctgtcagaacgtctgcgcgaatcggctttcttgttaaaaggtttgaaaatagaattaattgatgaacggaaaggcgtaaaagaagtattttattatgagaacggaattgaagcatttgtcgcttatttaaacgaggaaaaagacgctttatgcgaagtggtgtcctttgaaggcgagcatcatgacattgaagtcgatttcgcgtttcagtttaatgacgggtattcagaaaatatgctgtcattcgttaataacgtcagaacaaaggacggcggcacccacgaatcaggagccaaaacggcaatgacaagagcgtttaacgagtatgcgcgaaaggtcgcccttttaaaagagaaagacaagaaccttgaaggcgccgatatcagggaaggtttgtccgcaatcatttccgtccgtatcccggaggaactgctgcaatttgaaggccagacgaaagggaagctcggcacaagtgaggcgagatccgccgcggatgccgtcatttctgagaatcttgcttatttcttggaagaaaaccgcgatacggcaaccctgcttgtcaaaaaagcgattaaagcaagccaggcccgtgaagcggcccgtaaagcgagagaagaagcgagaagcggcaaaaagcgcaaaaaatcagaagcgacgctgagcggaaaactcacaccggccggttccagaaatccggcgaagaatgaattgtatctggtggagggagactctgctggaggctctgcaaaacagggaagagaccggaaattccaagccgtgctgccccttcgcggaaaggtcatcaacacagagaaagcaaagcttgcagacatcttcaaaaatgaagaaatcaatacgattattcatgcgatcggcggcggtgtcggcgcagattttgatatagaggacatcaactatgacaagatcatcatcatgacggacgcggataccgacggcgcgcacattcaagtcttgctgttaacgtttttctaccgctatatgaaacctttaatcgagcacggaaaagttttcatcgcccttccgcctctttacaaagtgagcaaaggaagcggcaagaaagagattattgaatatgcttggtccgacgaagaaatggacggcgttttaaagaaagtcggcaaaggatataccatccagcgctataaaggtctgggagaaatgaacgcagaccagctctgggaaacgacgatgaatcccgaatcgcgaacgctcgtcagagtcaagatcgacgatgcggcacgggtagagcgccgtgtaacgacattaatgggagacaaagtagaaccgagaagaaaatggattgaaaagaatgttgccttcggattagatgaggaaagcaatattttggaaaatgaaaacttgtcggtcgctgaggaggtttaatagtggcacagccagaattatttcatgatttaccgttagaagaagtaatcggcgaccgtttcggacgctacagtaaatacattattcaagacagggcgctgcccgacgctcgtgacggtttaaagccggtgcagcggagaattttatacgccatgcacgcagacggaaatacattcgataaaaatttccgtaaagcggcaaaaacggtcggaaacgttatcggtaattatcatccgcacggtgacagctccgtttatgaagcgatggtgcggatgagccaggattggaaagtgcggaatgtgctgattgagatgcacggcaataacggaagcattgacggtgatccgccggctgccatgcgttatacggaagcgagattatcttctatcgcgtcagagcttttgcgtgatattgataaaaatacggttgaattcgttccgaactttgatgacaccagtaaagagccggttgttttgcccgccatgttccctaacttgcttgttaacggatcaaccgggatttcagcgggctatgcgactgatattccccctcatcatctgggtgaggtcattgatgccgtcattaaacggattgaatctccggattgcactgtcgatgacttgatgcaggtgattaaagggcctgactttccgacaggaggcattattcaaggagtcgacggcattcggaaggcttatgaaaccggtaaaggcaaaattattatccgcggcaaggctgaagtggaatccgtaagaggcggacgggagcagatcgtcattacagaaattccgtttgaagtaaacaaagccaatctcgttaagaaaatggacgaataccgcatagacaaaaaagtcgaaggcatttctgaagtcagggatgaaactgaccgcacggggcttcgggtggtcgttgagttaaagaaagaagccgatgcaaaaggcatcctgaatttcttatataaaaacactgatctgcagacaacatataactttaatatggtcgccatacataaccgccggccgatgctgatgagtcttacggccatcctggatgcgtatatttcccatcagaaggaagtggtgacaaaccgctccgtctttgaattacaaaaagcaaaagagcggcatcacatcgttgaaggactgatgaaggcactgtccgtgttagatgaggtcatagcggtcatccgggcaagcagcgacaagaaagatgcgaaacaaaacttaatttctaaattcgcatttacggagccgcaggccgaagcgatcgtatccttgcagctgtatcgtctgacaaacacggatattacggcgctaaaagaggaagcggaagagctcagcaagaaaattcaggagctcgaagccattttaagtcatgataaaaagctgttaaaagtcattacaagcagcctgaaaaaattgaaaaagacctatgctgacagcagacggtctgtcattgaagaaaagatagaggaaattaaaatcaatcttgaagtcatggttgcctctgaggacgtatatgtgacagtcacaaaagacggctatgtaaaacgaacaagccagcggtcatttgccgcttctaacggccaggatttcggtatgaaggatactgacaggctgattcaccaatttgaaatgaatacaacggatgttcttctgctctttaccaataagggaagctatgtttattgtccggttcaccagcttcccgatatcaggtggaaagacatggggcagcacgtaacgaacatcatcacgattgaccgtgatgaaaccatcgtgaaagctataccggtaaaagaatttgatccatcttcatatttactgttcatgacgaaaaacggtatggtgaagagaactgaaatgacgcattacaaagcgcagcgttactcgaaagcgcttgttgcccttaaccttaaaggggatgatgagctgattgatgttcatgtcacagacggcggcagccagctgtttatcgccacccgcctcgggtacggtttatggttcggtgaagatgaagtaaatgtagtcggtgcccgtgcggccggcgtaaagggcataaatttaaaagacggtgataccgtcgtatcagggcaaatcctgcatgaaacagattcgcttgtcctcgtcacacagcggggagcaatcaaacggatgaacctatctgaattcgaaaaaacatccagggcgaaacgcggtgtcatcatgctgcgtgagctaaaaaagaacccgcatcgggcagtcggcgtatttgcgtgcgctttggccgacatgatcgctgcggaaacagaaaaaggcgagagaatcgaaatcgccgtgaagtccttgcgggcgaatgaccgatacagcaacggctccttctttaccgatgaagatgagacagggccggtaacagatgtatggcgtatccctgcatacgatgtttaagagtaaaaataaaataaaaaacctccgctcattgagcggaggttttactatttagctttcatggctgccgaataagtcagtgatagcgtgaatgacttcgattccctgccatacaaataaattcaatgcagtgaatgaaaacaaccctaaaatcaccattcgtaagataaacaacatgtttaacaacctcctcattttatgttacatagataggcgatgttgaacatgaagctcatcgaaatacgaggactgataaaatttagcgattaaaaagcttttctttcgctgtcttctccgggaagcggggcgtctcctgtctgatatcacaatcagtgagacagaagcggcaaaaagcgccgtcaagatatatgagcccgtcagcgattttttctcatcatcagcattttggccggccttcatttcgtgcatttcctgctggtcggctaccgctttaaaatgatgagcggtatcaaacgcatggggaatggagagcaaatgaaagcttgcaatcgctaaaaataaaatagaagcttttaaaaacaagatttttttcaaatgttctcctcccttcataagtctgaatatttttattataataccctaatttaaatgtaaagtaaacacatttattaaatttaaaaaattattatcctggttaagtatataccattccatccatcttttcatctcttttttcttaaagacctatttgttatgatatgcacgcattccttataacgtgacaacatttttcaggctgtaagataaaaaacggggcatgacagcaaaagatgtgatgaagaaaccgaaacattttcttaaaaaaacttctcaaccactgttgttgtgatataataatacccgttgtgttaaaagatctaacatatacagcaaaaatgacagtaaaagatatgtaaaagggaggttaaacatggaggctttcatcagtgaaatcataaatgttccaaatgattttatttggaagtatcttgtttatattttagtcgggatcggattgtactttacgttccgttttcgctttattcaattccagtacttttttgaaatgttcagaatcgtcggggagaagccgcaaggaaataaaggagtgtcttcaatgcaggcattctttatctcagcagcttctcgtgtcggaaccggaaacttgaccggcgtcgcgctggcgattgcaacaggcggtcccggcgcagtattttggatgtggatcgtagcgattgtcggtatggcttccagctttgtggaaagcaccttggcacagctgtataaagtgcgttccggtgacgaattccgcggcggtccggcatattacatggcaaagggactgggcgcccgctggctcggtattttattcgccgtattgattaccgtttctttcggacttatatttaacgcggtgcagtcaaatacgatttctgtggcgtttgacgaagcattccatgtgaataaaacagttatcgcaatcattttagctgtattaacggctttcattatattcggcggtctgaagcgtgttgtttccgtctcgcaattaatcgttccggttatggcgggaatgtatattctgatcgcgctgtatgtcgtgattgtaaatatttcggcggtacctgagctgcttgttacgattgtgaaaaatgcgttcggtcttgagcagatcgtcggcggaagcttaggaagcatcattattatcggagcgcagcgcggcctgttttcaaacgaagcgggaatgggaagcgcgccgaatgccgcagcagctgcacatgtgtcgcatccggctaagcagggattaattcagaccctcggcgtgttctttgatacgtttatcgtttgtacatcgactgcttttatcattttattgtacagcgttacgcctaaaggcgacggcatccaagtgacgcaagccgcactgcagcaccatctcggcggatgggcgccgacatttattgcgattgcgatgtttttattcgcattcagctcagtcgtcggcaactattactatggtgaaacgaatattgaatttattaaaacaagcaaaacatggcttaatatttaccgcgtattcgtcgtagtgatggtggtatacggatgtttggctgacttccagatcgtctgggacatggcaaacttgtttatgggtctcttggctctcattaacttagtggcaattttactgctgagtaatgtagcctacaagatctataaggattatgccgctcagcgcaaaaaaggtcttgatcccgtattcaaagccgagaatactccggagctcaagcatattgaaacatgggcggaagaagaaggtacaagccctgaacgtaagactgctaactgaggaaacatgcatacaattttcaaaaaacccccttacattttgttgtgaggggttttttatgtgaaaaaccgggttatttttactggaaacagatttttttgaatttattgtatttttctcttgtatatgtaagtgctttcatataaagtttaactaaaccggtttaccaaaccgatttagtcttaaaggaaaggagtattgatgtggcttctgattatggcatttttacgatcggtgatgcgatgatcaccttaaatcccgcaagcacaggacctttgcgttttgttacccattttgaacgaaaagcaggaggagctgaactgaattttgcgattgcatgcgccagattgaacctgcactcaaagtgggtcagcagactggggaaggatgagttcggcagagtgatttatcagtttgccaaaggagaaggaattgatgtgactgacgtctcctttgttgaaggctttcctacatctttaaatgtcaaagagatcagaaatgacggttcaggcaagacgttttattatcgtttcaattcaccaattctgactcttgcaccggaagatataactgagaatatgtttgacggcattcacatcgttcatcttaccggtgtgttcctcgcgcttggtaagaaaaatcttgaaattgctgaaagggtgctttccatcgccaaagcaagaaagattcccgtatcttttgatccgaatatcaggctgaagctgtggacgattgaggaggcacgtgcggcatttcatcaaatctttccgcatactgatattcttctggcgggccgggacgaaatgaaacagctgacaggtataggagaaaatgaagcattagcccggtttgcagagagctattcaatcagtcagcttgtcataaaagacggtgaagcgggttctgcgctgtatcatgatcataagtgggttcacaaagaggctttcccggttgcgcctgtcgacacggtaggagcgggtgacggctttaatgccggctacctgtacagttatctacatggttttgaaccggaaaaacgtctggagtttgcaaatgcagtcggtgcgctcgtcaccacagtttccggtgacaatgaagggcttccctgcctagaagaggttctgtcatttgtaaacaaagagactgtgattgaacggtagcaagcacaacttaaaaagcgggtgaaaaaatgaaagcggttcaagtacggaaagcatttgatctgatggtgacggaatgtgagaaaccgtctgttgtccacgcggatgatgttcttgtcaaggtgaatcgggtcggaatttgcggatcagatttgcatatttatcatgggacaaatccgttagcgtccctgccgagagtaatcggacatgaagtcacaggggaagtcgcaaagaccggttctcatgtccggcgtttcaagccgggtgaccgggtagtgattgaaccgatatcttattgcggaacatgctatgcctgccggaaaggacgtccgaacgtctgcaaagcgctttcggtgttcggcgttcatgaagatggcgggatgcgggaatatatcgtgcttccggaaaagcagctgtatgctgtttcgcccgatctaccctgggaggaagcggtcatggcagaaccatatacgatcggcgcccaggccgtttggagaggccgtgtcgagaaggaagataccgttttgattcaaggagcggggccgatcggaatctgcatattaaaaatggcaaagttcaaaggcgcttccgtcatgataaccgacttgaatgatgaacgcttggccttcgctgaaaaaaacggtgcggatgttaccgtcaacgcgcaaaaagaagatcccgttttgcgggtgaacgaatggacaaaaaatgaaggcgctaatgtcgtcattgatgccgtctgtctcccctcaacgtttgaaacgtcaattgacgcagtgtctccggccggtcatgtggttgtgcttggttttgatgagaggactgccggcatttctcagcttccgatcacaaaaaaggaagtcacgatcaccggttcaagattgcagacgaatcagtttccgtacattacagacttactgaataaaggcctgttaacgcacggcggtcttattacacatacattttcagcagatgacgtccatcgagcatttcagttgatcgaacagcacccgggcaaggtgggaaaagcaatcattacgtttgattaaaggaggagcgagaatgctgcctaagtacgccatttacgaaaaacttctgcatgcacaagtggtggctgtcataaggggacaaaacagccaagaggcgcttgaagtttcaaaagcggccatttcaggaggtatcagcgccattgagcttacatacacaactcctgaagtggaagatgtctttaaggaactccggcatcaagatattcttcttggagccggttctgtaatggataccgaaacagcgagacacgccattttatcaggcgcctcatttatcgtcagctctcattttgtaaaagagatagcatctctatgcaaccagtacagcgtaccgtatcttccgggatgcatgagcgtgtctgatatggctttggcgctcgaagccggatgtgatgtggtaaagctgttccccgctaattcgtttaatccctcatttatcaagtcggtcaacggccctctgccgaatgtccgcattatgccgaccgggggtatctcattaaacagcatgaatgactggctttctgccggagcggtcgcggtcggagtgggaagcgacttgacaaaagcatatcaaaagggcggctatgaagctgccgtatccctcagcaaagaatacgtctgccgaaaaaacgaatatacgggggtgtaacatgaatatcacgtttcgctggtacggccaaggtaatgatacggtgacgcttgaacatgtcagacaaattcccggggtcaaaggcatcgtctgggctcttcaccagaagcccgcgggcgaagtatgggaaaaggaggacattgaagccgaagtcagattcattcaatcctatgggtttcatgcagaggtcgtggaaagcgtgaatgttcatgaagccattaaactcggccatgaagaacgcggacaatatattgagcactataaacagaccattcgcaatctgtccgaattcggcgtgaaagtcatctgttacaatttcatgccgatttttgactggacgcgtactgatatgttccgcgcactggaggatgggtcaactgctttgttttttgaaaaagcgaaagtggaaagtctccctccagaagaactgatccgcacggttgaagaatcttctgatttgacgcttcccgggtgggagccggagaaaatggcccggatcaaggaactgtttgaagcctatcaaacggtcggtgaaaaacagctttgggccaatctagaattctttttacatgaaatccttcctgtagcggaggaacacggcattcaaatggccattcatccggatgatccgccttggtcaatttttggcctgccccgtattatcaccggtgagaaaagttatgaaaagctgcgagagatttcagattcacccgccaactgtattacgttgtgcacgggttcgatgggagcggatcccgccaatgatatggtgaagatcgccaaacactatgcgggagctgcgccgtttgcccatatacgaaatgtgaaaatctgcgataacggtgattttacggaaacttcgcatcttaccagtgatgggtccattgatattatcggtgtggtaaaagaattgcacggccaaggctacaaaggatatgtacggcctgatcacggccgtcatatctggggcgaacaatgccggccgggctatggtttatatgatcgtgccttaggaattatgtacttgagcggactgtgggatgcgttctcgtctcatgagaaagaggtgaagagatgagaccgattcatggacgtttatcaggaagaaccgctgtcataacaggcgggagcggtgttctctgttcagcaatggcaaaggagctttcacggcaggggatgaaaattgcgatcgtcagccggaatgctgataaagcagagcgtgcggcgggcgagattgctgatgctggaggaaccgcggtttctgtaccggctgatgtttcagcccgtgattcgctcgaaaaggcaaaagacgagattatcagccggttcggctctgtcaatcttttaattaacggagccgggggaaaccacgctgatgcgatcactgccaatgagacgtatgaagaggatgagcagagcccatcattttttgatatggacgaaacgggattttccagcgtattttcaagcaactttaccggtgcatttctggcatcgcaagtgtttggaaaagaccttttgaaggcggaatgtcccgcgattattaatatttcttctatgagtgcgtatacaccgatgacaaaggtgcctgcctacagtgcggctaaggcggcggttcagaattttacgatgtggatggctgttcatttcgcgaaaaaagggctgcgggtgaatgccatcgctccgggtttctttttgactgcgcaaaaccgtgagttgttattacaggaagatggaagtctgacagaccgatccaataagattatggcacatacaccgatgaaacgtttcgggaaaccggaagaccttctgggaacgctcctgtggctttcggatgattcatactcaggctttatcaccggggtcaccgttcccgtcgacggaggttttatggcttattcgggagtgtgacagaatccagttccctgtcagattgtaaactatttacttctgacttatactagtgaaaaatgaagacagacggggatgagtctatgaaaaccattacaatttctgatgtggcgaaatatgcaaacgtatctaaaagcaccgtatctcaatttttaaatcagcgctatgactatatgagcgagaaaacgaaacaaaaaatagaagcggccattcatgagctgaactatcagccgaatttcgtcgcccgcagcttaaaacagaaatcaacatttacggtaggtgtggtggtggctaatattcttcacaccttttccactcaggtcatcagggcggtggaagactattttcatgaacaaggatttcatattattgtctgcaatgcggatgatgaaccggaaaaagaaaagaaatatattgaaatgctcagggccaagcaggtggacggaattattatttttccgacgggcgaaaatctctccttatatgaaaagatgaaacgcgatacgtttccggtcgtgtttatggacagaaccattgaagaactcgggattccgacagtgatgcttgataaccatcatgcagccggtcttgccgttgaccggtttatcgagagcggcattaagagaatcgcgattattacgacgtccattattcgggaaatcagtccgagggtagagcggattgaagggtataaaaaggcgcttgacccccacgggatgatggtgcggaacgaatatatcaaaacagccgatgcggctgatatttccaatgttttgtcagagctgttctcacttcaggagcctccgaaagcgatattggcggcaaacgatatcgttcttgttgaggtgctgaagtatatgaaggagcatgatatgacaatcccggataaggcagccgtcatcggaattgatgaagttccttttgcgggtttttttactcctccgattacgacgatcgtccagcctgcggcagaaatggcgcgaaaagcgggaagccttcttctttgccagatacaagaaaaagatagcggtgaaaaacggattcaccgctataaaccggcgcttctggcaaggcaatccggataaccggtttcattacataaaccggtttactccggcaatttaaattatgaaataagagggagggattttatgttctcaaaggatagattccctattcttcttcttttattttcagccggggtgattaactatttagaccgttcagcgctgtctattgcggcgccgttcatacagcaggatctcacattgtctgcaacccaaatggggctgattttcagcagtttttctgtcggatacgctgtgtgtaacttccttggcggtgttgcatctgaccggtacggggctaaattgacattgtgtacggcgatgatcgtttggtctcttttcagcggggcggttgcgcttgctttcggatttgtaagtcttttgattatccgtgttttattcggtatgggcgaggggccgctgtcggctgccataagcaaaatggtcaacaattggtttcctccgtctcagcgcgccacggtcatcggcctgacaaacagcggcacgccgctcggcggagcgatttccggcccgattgtcgggatgattgctgtggcattcagctggaaggtttcctttgtcctgatcatgatcgtcggtttagtctgggcgtttatctggtttaaatttgtcaaagaacggccggcacagacggaagacaccccggcaatgaaagcggcggttcaatcgcatgagcagcatatcccgatgaccttttatttaaaacaaaaaacggttctcttcacggcttttgcctttttcgcctacaattacatcttatttttcttcttaacatggtttccgagctatctggtgaaagaacgcggattaagtattgaatttatgagcgtggtgactgttattccctggattcttggatttatcggtttggcggcaggcggaatgatttctgattatgtatacaaaaaaaccgccggaaaaggggttttgttctcacggaaagtcattcttgtcacttgcctgttcgcttccgctgtactgatcggatttgccggacttgttaccactgccgtaagtgccgttattctcgttgctttatcagtcttctttttatatataacgggctctatctattgggcggtgattcacgatgtggttgatcaaaggaatgtcgggtcagtcggcggctttatgcattttcttgcaaacacggccggtattatcgggcctgctttaaccggctttatcgcggataaaagcggatcattctcgggggcgtttttgcttgcaggcggattagctgttttggcctcggctgcggtaatccgttttgtgcgtccgattatcattcaaacagtttctgaagataaaaaagacacgataccttattcataagtcatcaaagccactgaggctgtcctgccgataacgggatggccttttcgttctcccgcttgatctgttcctatgataatataggaattgtttacaaaagaagggaagaggagggagcatgaaacagaagccgatatatgtcgaaatcaatattgcatctgatatagaaacgctttgggaatatacgcaaaacccgcatcttcataaagaatgggatctgcgtttttctgacattacatatcttcataggctgccagatgaaccgcagagatttctatatgaaacacgaatcggttttgggctgaaggtatccggcacgggcgaatcaataggtgacataaggcctcgcttgtcagaaagagtgtcttcgctcgcttttgcctctgatcatccgctgtcacttataaaagaaggcaggggctactggaagtatacagagcgggataacggacaaacctcatttttgactcaatatcaatatgaaacggcccgcggtctgccgggaagttggatagaccggtttttatttcgtcctctgctaagctgggctaccgcatggagctttgatgcgttgcggctttggatagaacaaaacagacatccgaagatatcggtccgtttcggatttgtctatgtctgtatgtgcctcgtattcagtctgtattggttttttcaaggctttcatgatggctgtgccgatgcagagatcgtgaggggaacgctggagacagggttaggggtattatggctgcttcccatgcggagaaagtggctgattcacgccgggcagtcagtcttcttttgtgtaacggcactgttatattccggcggcggattcttgatttcattaggagtccttacgatagccggcatgattcttaagctcaagctgccgagcgcctggcatacaaaacgaaagagagaagtgaaatgacggattcaatgtatgaaaaaacgattactcattatcaatcactgcacccgatgctgcagaaacggtacagatttgacggatcacgcacgttttgcggagaaggcgttatgtcagaaataaagggaggttcttttcttgtcagaatgcttttaaagaccggtgtttttttcagatgttttttctcagagaggggaaacgatatcccttttactatcgaaaacaaaaacaggcaaaatggcgtggaatggaatcgtacctttttctttaaaggcaaaacgcgtttttttgatgcggtcatggaatatgatgagcgggaaaacagaattcttgattacttcggcaaacctcacatcctactgtctgaactgcatttagaagcgtcttcagacggagggcttgttattacatccggaaggcagtggctcctgataggcggaaagaaaatcccgattccggcatggctgtgcgggaattcaaccgtttatgaggcttatgatgaggaaatgaattgcttcagcataaaggttcatgtgaaaaaccggatactcggcacgcttttctcttaccgggggactttccgggaaacagagggagaaacatgctgaagcgtcatctcatggtaagcgtggtttgctttttgggatttgcggcggctgaagctccgcatatatcagctgctgagacgtttgttttattttccgtgctttttttcgttcccgctgtattctgctttgcttttcggccgtcaaagaccttagagaatgtgtggttacggagttatcctgttgccgctatatgtgcggcgcttgcgcttgtcacaggcttcagcttttttgcctttgtgtggttcatttatacgcttggactggcactgtatgctgtccgccggctgatgaaaacaaatattcacagaacagaagagatgtcagttatggcgggtttcatttatttggccgggggcggattctggttcttcgcatatgtccttgagattcccgtcctgaatttcggcccgcttatcgttctgctgacggcggtgcactttcactattccgcttttctcattccgatctttaacggattgctcggcaggatcatacgggagaaacgcggactttaccggtggagcacagtcattattttgatttcgccggtcctaattgccttggggattacattttcaaagacacttgatgtgattgctgtcgctctgtatcttgcgggtctgtatgtaaatgcatatctcgtctttaaggcgccgtttgttacgaaaacaggcaggatcttgatcaggagttcttcggctgtgttaatgatcacaattgctttttctttgatatattcgtacggtgtctaccgcgaggaggcaacgctcacgatcagccagatgatttggattcacggggccgtcaatgcatttggcgttatcctgccggctttggcggggtggagaatagaaaatcctagaccgttcgatgagaacagtgaaagaacgttcagcagaatttacgggaagggaacgataggcaaagattttttgactgacattcatgcagcaaatgacatccattataccggccttcaggatcagctgagagaactgcattctgaagacttttcaactgaaaagctggcgccggccgttatttccttttatgaaaagacaattgattatgacatcatggcgaaagtgacgtggagcggttggtttcgtccgttcgcgcgcgtgtacgagccgttcagcagaagagcgggacagattcatctgtccatgaatccggattggtatatcatgcacagtgatattataggagttgactctgataaagacggcagaaaaaatgtccgtgcatggatcagaacaaatgaaaagcaggaaaccgtttttactgcgctgtattcagcatacaggtcaaaaggggaaggatacatgaatatctctcttcctctgccgtacggccaaatgacgggcattttaaagccttatgcgcgtaagcagaatcttgttttgacaagcagacggcgaaaaagcggagcgggtgatgaagggatttatctccagacgaaatgggggacgtgtcatcttccgctggcagagacatttcttatttcagcccagagcgaaacaagcctgaaggccgttcatcatatgtggctgttcggactgaaatttttaactgtgcattatcggatcactcatgcttccgcaggtaaccgaagcaaataataagctgcagagccgtctgtttatcaggcggctttttctcattatatgaatagataggaagaagataatgcacccggaagtcaattcatattagaggatgtgatgcgttacgaaagacaaggtgctttttctcattgtcacgtttatcttatggagaaagttttttgtcgttttggaccgggagcggcctcggtcttgcggtctttgcctgtctctcacgattcgtgaaatgaaaacggctgcaaagattcctacattgagcggtatgatgaaggcagccgggcagatggccctgctgaaaatcttgttctttttgtttatgattacgcggaaaaaagcagggaagatgcggcaaagtattatcagacctgattttttatatgcttgcctaaagaaatgatctcattgcgggtaatgaccaaacaagaaattcatttcaagcttgcttttgcgttaggtttttcagctgaatcaaaactagcgctgtaaacatttattgcagttataaatttctcttctttgtctcaataactaaagtatacttggtttatgagacttgtaattcatttctctgtataacttcctagaatatatattatgtaaactagaaattgtgaagagaatatataagtgggtccatattctaacagcatcccctttttgtaaggtaatattaaaaaacctctacgtaaaatcctttgatacattaaacgggcgcccatctttacgcttatacatcgtgctattctgatggccgatgcttaccaccacatatcccacgcttgccaagtctgtacagatcactgtgccccattctggagaaccgcccccgccgcaaacatagaataacaccggatagcgtttttccttcccggagagagcaaggccgtcgtaacattgggtcttgatatctatagagtaagcattcttccgcgcagtgagaagcggctgctcatcaagcatttcgcagacttcaggaaacatgtacgttgatgtagtcttcccttcgctgctgtcggacggatagtacacaaacaccgtcagttctctttttgtatgatctgatgccgtgtactcaaaatccagttgtgtgcggccgacagtatagccgccggttggctctggaaatgcgtcataccttttcattctcttgttcccccttaagtaataaaagtggcgggtgtaaaatacatacattgcgctataaacgcttttcaaaactgtgaaacgattacattatatgtacagtcatatctacttcttcacgtaaacctccatgtattgctgtttaagatgataaaagcggacatcgttgctgatgtccgcctaaagcttaactaattgggttctgttccccaaatcagttttccttgatgatataatgtgatttttttcgttgttttaaatgtatttgattggaaaaaggaataatcgtcgctttgtgcataattactccagtcatcattgtgaagacgaagctgaatattccctgtgcttgctcccggtgacagcgttcctgttttaaaacccagttccagataggtatctgcaccttgcttaggtttatgcagcgtcacaaatttgtgggtcagattgccgcatccaatctgcgcgtagtcacagtcaaagttttggcccttgtttttcgcgttataccagtaacgggcagtgacatcttttaaatcaaccgtcgcattgccgttattttttatgtgaagctgcgggcggatttggttgctgttcacacccccatcccctgctttgtattgtacagaaatgccgttttcctgtgcggggttatcttgtgctggcgtttcagggcgttctttcgttgaatctttgttgccgagaatgttttctcttacgaatgttcctgaagcagttaaatctgtaagcggccagccgcctgttttagatgctcccggctttaacgctgaggatgattcctgcttatcagaaagattccagttcacccagctgatgttcttgctgtcgagataattcagccattcccgcgactggtcaaggaatacaccgccatttccagacgcgtcgcttgttccccattccgtcacgaaaataggcgctcctttactgagtgcatagtttgctttatcccgtaaagattggccgtgtgtgccggcataaaaatgaagcgcgtacatgacgtttgcatcttttagctgatcatcggctgcatcattcacatcttggctccatgtaccggttccgacaatgatgatgttgtctggatcatttttgcggataacggaaatcacttcttccgcatacggtttaatatcacgcttccagttcacatcaccgtttggttcgtttgcaatttcataaatgacgtttggcgtgtttccgtaaagacttgacatttccttaaaaaattcttttgccttctctttatgttggtttgggttgccgtcatttaagatatgccagtcaatgatgacatatatcccaagttcttttgccgcttcaaccgcttcttttactttatttttcacggacggattatcaatataaccgccatctgccgtatacatcgccgcgcggaaaacggttatgccccaatcgtctctcagccattttaagctgtctttattgacaaaatcgccataccattgcaatccatgtgaactgatccctttcaattgtaccgctttgccgtcccggtttacgagctgtgttccttttatgctaagctgcccattcttggctgctggcgtttttgtccctgctgcagatgcctgggaagcctgcaagccgcccattgtcaatactgtaatcaataaacacgtaataaaaatagaaattgaccgtttcatatctgatcttttcctccttcgcattattttggctcttcacttcttatgagctcgaactcattgtaaaaatctttctcatgattgtctatcaacctaatttcttgtttttgggaggtttaaaagcctgtcaatttgctctaactctattgaataagacacacctgacacatatagaacaaagaaaactggactgaatcgggactttacacgttatttttcaatcgaatcgaaaaattaaatgtatttccgacgtagacgctctaaatgtaatgtgatgagtctcaatatggcattgaatcttatgattgctgtaagaagacgagcccttgcccgtccttgttaatttaaggttgatgtaaggttcggattaatacgggttaaggttggagttgtacaataagattgtacttcagtgtgggattcagccagaagaattcccccttcaataaatcatagaggtgaaaaggtttgagagaaaataaaattttgtcttcattatgttacttcagtatattttttgcgccgtttctgtttccgattatcgtctatttcttaagccgggacgatgtgaaagaacatgcgaaaaaatctttgtggacgcatctgattccttatttgatttttggaattggcatcatcgcttcaggtttacttggtatgaatgatatcagacatgccgggcctttcctgcttgcgacttatgctgttacattccttgtggcgatctattttttcatttggaacattgtcaaaggaatcaaagtgttttcggaacaataggaaaaaacggttctgttattaatcagcagaaccgttttttttgtatagccattatgataattgtatatctatcgttgtcccttctcccgcggtgctgtgaatggtgatgtcccctccgtgcttttggataatatcctttgctatggccattccaagaccagagcctgcatgcgtcgttcctgtatttgtccccctgtaatagcgatcaaacactttttccagctcctcttcttctatccctttgccgttgtccttaattgtcacatgagttcgttctttttgttcaagctgtacaacgatcttcacatcgggatcattgtgaacgagggcatttaaaatgagattcgtgaccgctctccgaatcaatatcgcatcaaggttcagcatcagtttttccaggttcgtttgaagctcaatggacttatccgcatatctcgaatcgtttaaaatatcaattaacgtttcccgcagcagcgatacaaggtttacccgttctttatttaacatcacatcgttgtttttcagccttgtcgttaaatttaaatcttccatcacatctttcatatagagcgatttactctcaatgatccgggcgtaatctctgatctgttcgactgtgagatgataattcggatctttgatgatttctgcatagccttgaatagatgctaatggtgttttaatgtcatgagaaatatgactgatccactcttcacgcatttgctctaatttatctttttcttttttgcttaaagatagttgttccgataagtgattgacattatagaacacatctttataaatgcctttggatttcattttgatcgtataatctccattagctaaccgctggattccttgaatgacacggccgagcggttttgtgagctgccggctgaatagatagccaatgagtaacgcgatcaatgcatctattgataataatatgatggttcctgtattgaacttcgtcacaaattccttggtatcatatgagaggacaaattttccgagagagggatttttaaaccctataaagtaactgtactccttgccgtttactttttttccgccggcgtaaatggttgataataattgttcatccttatatttatgtaaatttacaatttcaataggcgtatattttttcttcagtcctttaggttctctatcatgataaacatcctgtccgttttcatctaatatttgaatccatgcattctgctcttttaaagctttttggccctctttgtttactgtgatacccttgttcgataacgtgacatattgtccgaatgatcttgtgaaagtttcaggtgtactttcttcgtcatgttggctgttcgcctgtaaaacgagccaaaacataaaaataaataaattaatgaagactgtaatgatggtcactatgatgacagataccatgtatctgcctgttaatcgccaattcatccttacgcatcctttacaacaaatttgtagcctaaccctttcacagtgacgagaaagtctggttttgatgggacagtttctattttctcacggagcctgcgtatatgaaccatcaccgtgttgtcagaaccgaaaaagtcttctccccatacagcttgatagagtgtttctttactgatcacccgattgggatgctgcagaaaataggccataagcataagttctttaggtgttagctcaatagccgcttcatttttggtgagctcggcttgttgttggtttaattcaaatggccctttttttatcacggttccggtttgagaaggctgtaagtaagagacccgtctcagctgcgctttgacccggtatgcgacttctttagggctgaaaggttttgtaatgtagtcgtccccgccgatggcaagtcctacaattttatccgtttcctccccctttgcagacaaaaagataataggaatgtgtgaaatgtcccttatttgcttgcagatatcatagccttcaccgtctggcagcatgatatccaatatcacaagatcgggattttcttgatgaaattgagccaatccgtcacgggcagttgaagcggtcactacgcgatcaatgccttctcttattaatacggttttgatcagttccaaaatttctttttcatcgtctatgattaatactttgctgtgaagccgtgacatatattgatcactccttgaagtcattgtcattattatacccaatgtccgtgtatcgttaaaaaatcaacattctctcccacagaaaataagccaattttcttttccgagtaagaaaattggcttaatgcaatgctgatgcctttaacgctttacaacaaatgttgtcacgctttgagccggcagatgggcccaaaaatgattatccgttactttgagatccgttccaggttgaagattgctgctgctgctcgtgatccatctggatacttgcgaagcagacccattctgcaacacgaagttttggttgacccctgtgttatttttattaatggcaacaatcacgactttattgtctcctttataggctgacacgtaaacattcggttcaggatttttcgttgcatcaatccttacatagccagggcgcacaaattttgagaaatgagccatattgtatccgcgtttgctgatcgtcccatcttctttcatcgggccgtatgatctgcggatgtaccaccacacataagcttgaaaatctccctctaccattgaatgatgaatatgctctgaaacacctaaagcctcaggccatcgatccgccgagttgttatcactgttcggatagtatacttccgtcatccaaaggtccttccccgctcctttttgtttgaaaagaggataaggaaactgactgacctgagtgccgtacaggtgggttccgaggatatccatattcctaagcgcctgcggatcgttcaaaatggggtccgatatatttttcaggtattgaaatgattccggcgcaatcacacgggcattaatggaaccggcattctctctcatgaaacgcaggatttcttgaggcgtccaccatgtccattcgtgagcgtaatcaggctcgttctgcatagaaatcgcatacagattcacaccattactcttcatgaaattaacgaaatcgttaagatgctgtgcgtatgcggcgtacttatcgtatctcagccgcttagctgatgtgtcaccattatgattgaaagtctcaaccatatcgtttggcggattccaaggggaagcaaaaacgattgctccgtgtttgatcgcactctttgcagtctccacttccttgtaccaattatttctattctcatctacatgaattcttaagaccgaaaaacctaactgattctgtccattgccaaaagcggtctcccgttgagccgcagtcaagtctccaatccaagccgggtgattcattcctccaaaaccgcgaatcacttgtctttctgcagatatattaactgttgcatcacttgctgctgaaacttcagtaactcccggtcctaacagcatgacggacagcattgtgaaacataccaataatacacaaattggtttttttacgctcgacatcattttttcctctccttcatttatcttttatagacttagaaaacgtacctttgcttatctttgtgtaaactgccagtaatcaacattaaacaagtttcctgtaccagttccggtaaatacaaagaatacgttgtgaacaccggatgcgccgcttaccgcagtttctatttctctccaggattgcgttccgcctgtggaagggacattcaaggttccgacaagcttaccgtttgcactgtctagtcgcacttctatttttccgccgagagcggacgctacatttgctttaaacgtcctggcaccgcctgacccgaaatctgcatttcctacagcaatccagtctccgttatgaatgtttgtgacatgttgattattgaccggcccgccgggtgctgaggatgcctctgtcaaaatccgtccgttccaggcaaacgtttccgcttctacccggttatatggattcaagttggatagctgtttgacacctgcaaaatttgccgctacctcttgcagggagccatctggattatgcacaagcttatttatatggggagaacggtatcctttgccggccccgtaaagagcggagctgacagtttgagtatgatacaccacataccactcgtttttaaaattaaaaacagcatggtgattgtttccgccgcctccgaaaaatgctcccggatttttcagaaagtgccctctatacgaaaaagaattcataggacttgagctggtcatatagccgatctcacctggaggtttatcggccgggtgcgcgcccccgaaattgatacaataggaatagtaatattttccgttatacttatgcattcccgaatcttcaaacataaaaggcgcatcaatcgtagatgcacttccggcaacactggtcatatcaggccctaatttcatgactcttgctgttttaggattggcccattgtccctgcgttggatttgaaccgcccggaacgcctccgccggcatataggtaaccggtaccgtcatcatctacgaatactgccggatcaaaaagccatacaacaccggacattcctggtgtacttggcgtcaccagcggttttccgatcggatctgtccacggaccggtcgggctgtctgcggtgagaaccccgatacctccgccgccgtttgcgaaataaaggaaaaatttatccttaccgttgatctttttcaccgcggctgacggggcccatgatgctcctgcccatttggcaatcccccggccgccattcaccccattggcacccgctgcgggaatcgctccgtgatctgtccagttcaccatatccgctgaagatatgacggatattttattcaaattggcaaatgaattatccttaatcgtgccgtcgctattatattcatagtcatcgcttgacatatagatatagactcttccgttataggtcagcgcaaacggatccgcgcccagatgatggtcgataagcggatttgaattcccaacatgttttgcaattggagtgctggcagcatacgcagacttcccagtgaagcaactcaataataaagcaaggacccataggcatacgcaacattttttacacataacttaacactcctcctttttctttaaattcggggaacttttaccatttgagaccaaattgcagtaccggcagtaaaaagcagactccgcagttaagcaactcaataatagagctagtacccataaacatacgctacacttttttctaataacttgacatccttctttttccttaaaatgtatgatgatttttttaccatttgatgacaaccagtcatggagaacggctctggagtaagccttgcgaacacaggagtatgactctcgcctttttaataaaaaacgccgctgagtgccaggccagcggcgttttacacttgatcacttacattttgtcaaacttcgtgtcgccagcaaacgatcctattgacagttgttcttcaagaacaagtccgtgatgatgccgttcttcaatccgtttaataatagatcgaattgcatccgtattttcttcgatattgtgaggttcaaagatcgtcacgtgatctccttttaatttgtactcaagataatgctgtgctgttgattgtgtccagcccctatcatcggttacatcgccgcatagcaaatgatggatgttggcgttaacggcgccggaattgatcagttcattgtgatacgcaagatagcctctgattttatccttaatcgaaggaatggttaatatttctctgtagtagtccggaataatgtccatattcagatggacgatctcttggatttcctcttccgataaatgagttaccgaatcggtgattttagaatccagcataatcacatcagatacggtgcgcccccgcttttctaaggctttggcaacctcaaaagccaaattcgatccggaagagtaaccaagcagaacaaaaggcccttgttcttgaatgcttatcatgctttctgcataccggtcaacgatctctttcccatgagacggctcttctaagaaatcagcggcatagatggtgctgacgccgtcaagtcttttcgccatttcattataaacgagtccatacccgattaaaggcgggaaacagaacacagggattgaatcttcctgattcagcttgacgaatacgttatccgtctcggattcgaaaacggccgcttgaatggcgcgtgccattgtttcgatggtaggaaaatcgtatacggcttgataatgcatgttgattcccatactggcgttaatttgatgaatgagctgcaatactttaagtgaatggccgccaacgtcaaagaagtgatctttaatcccggggtcaggcagagctaaaatatccttccatatatcggccagctgcttttcaattaacgttcctggcgctgcgtattcggttccggtaagcctatttccctcaggagccggcaacgcttttcgatcgatttttccattagcggttatcggcatattctctacttgtacaaaataagccggaatcatatacgtaggcagattgttcagcaaatgacgcttcagctgcgccgtatttaatgactcgtctcctgacaagtaagcgcacagctgttttgagccctctttttcaatcgcgatgacgaccgcttctttgacagcatcgagttgtagtaaagatgcttcgatctcgccgagttctatccggtagcctcggattttcacttgatgatcaattcttcccaaatactcgatattgccgtcaggcagccatcttgccaagtcgcctgtacggtacatcagcttccctgcttcatatgggtgagctgcaaacttctcagccgtcagctccgggcggttcaaatagccccgtgcgagcccgtctccggcgatacacagctctcctgccacaccgagcggttgaaaatattccgattcggggtgtacgatatacaattgaatgttggaaatcggtttacctatcggaactgagttaagcgtttctcccgcttcgcattcaaaatacgatacatcgatcgtcgcttcggtcggcccgtataaattgatgatttgagcctcacccgccggtgtgatcaagcgatgaaaccccgcaacgtgcgcaggcgtcaaagcctcgccgcttgcaaatacatattttaatgatgccagctttctctttaattcctcgtcggatttttgctccatggactcaagaaaagcatgcagcatcgcaggcacaaaatgcataatggtgacatttttctgcgcaatcgtatctaagatgacgtcagggttcttttctcctccgtttggaagcaataccgctttagaaccagtcatcgaccaccagaacaattcccacaccgatacatcaaaggtgattggggttttttgcagaatgacatcctgcttatccagcgggtaatgtttctgcatccaaacgagacggttgattacggatcggtgttccaccataacccctttcggtcggcctgttgatcccgaagtatagataacataagctaagtgattcggtccggcagtctgtttcaagtttgaaccatcttcccaagagaatcgcggatcttccaggtcaagcacttttcccgtaaaaggcacgcttttcctcaagtgactctgtactaacaacagcttcgtatccgaatcctccaatatatagtgaatccgttcttccggatagctcggatcgatcggcacatacgcgccgccggcttttaagattccgaagagtcctacgatcatttccaaggaacgttcggccataatcccgaccggctgatccggctgcacgccttctgattgcaatgtccgggcaagttgattggctctttcattcagttcccggtatgtcagctggctttccccgtatacgacagccgtttgatcaggcgtacgctgtgcttgttcctcaaacaatttatgaagcgtcttttcctttggataatctgcttccgtatcattaaatgcctctataaggagcgaacgttcatcccccgtaagtatatccaagtcttggacgcgaatcgcctgactgttcaccatctgcttaatgatttgcataaaatgctcttccatccgcttgacacttgcatgatcatagacgttgctattgtatacaaaatgaatgtcgatttctcccgcgggcatgacaatgaaattgaaatcgtaatgggtatgctcttccatatggaaattgataatgtccagtgcgtcacgattcggtttcatatgctccatttgtttctcgaccggataattttcaaataccatgatatgactgatcagctgctgcttttgttcagtttgagcctgaatttcatataacggaaatgtatcatacccttgagaagccaatgcctgctcctggctcattttcaacacttgttccacagtcattccaggctgagcggtaatacggacgggaatggtgttgataaataagccgaccatggactcgatacccggaatttctgccgggcggccggatacaaccgacccgaaaacgacatcctgactgttgttgtacctttgcagcaatagtccccacgcactttgaatgaacgtattcacggtgacgtgatgcttgcttgcagtctgtctgatttcttctgacagctgttttccgagccggcatgcaagcctttgtttttgatatcccttggcttggtttgagacaggttctttcagtaaaacagtttgtccttcataaccgtccaaatatttttgccaataggctgaagcgtgcttatgatcctggtcttccagccattcgatatatcggctgtacggggtgacgacttcccgctccgcttttcttctatcaagaatcgcataataggtttcaaatacttcattcgtaataagaggcagacaccagccatccattaaaatatgatggaagctccatatcaatcggacttggtcatcctctgtacgaaggattgatacgcgcattaatgcatcttggataaggtcgaatcctcttgccttatctttttgtacaaagccggcaatgaactcgtttcgttgtttattcttcatgcttcgaatatcttcaacagttatttcgatcggtttttttcggaatacgatctgcaaaggctgatctttccattccgtataaaaatgagtccggagaatctcatgtctttccgccagctgcgacaaactcattgtaaatgcctcgatatccaagccgcctttgagatcaaaaacggcttgttcaaagtaagctctggaagccgaatcgattaaactatggaacagcatacctttctgcatgggagttaatggatatatattttcaatctcgccgatatgttgtgtttgctgaacaaattgatctaattcctcgattgttatgtccttcagtgagatatcgcttggcgtcaggtgaatgtcttcttgagctgcgcaatgttcgatgacttcttttaggctgttctttaagagagctgcacatgtttccatcgtttctcttcgatattgtttaccgctgtaactgatggccaatgacagccggccgtctgagatcatgccgttaatgtcaagcgtataggcaatgggatgtctgtcgcttgcaattttccctccggagtaaggagatacttcgattcctccattttcgagatcttgatcaaattgtccgaggtaattgaagctgatttccggatgtccggtccattctgatgccttcggatgatcggacgaatatttcatcaggccatatcctattcctttttggggaatctgacgcagctgttctttcaccgtcctaatccgctgggagatgtcccggtctgcctggatttgaagagaaaccgggtattgggttgtgaaccagcccactgtacgtgaaatatcaacgtcttgaaaaatagattccctgccgtgtccttccagatgaacatgaatttcttcatgccccgtccagcgatgaacagccattccgagtccggtcagcaataaatcattaatgtcagtcgtataggccctgttcgatttttttaataaatgctcggtttcttcctctgtccattggacgatgatcgtttcccggtcttcggccagaccggtctcctgctcattatcctttggcaatttgtgttgcgagatatgtttctgctcaagccaatattgattttctgcttcaaattccggactttctgcataacgtttcaatcgttcagcccataacagataggaatccgtcttcttagggagcgtgagcgcttctccgttttggagctgctcataagctgacgttatatcctcaagtaaaatcctccacgatacgccatctacaaccagatgatgaatcgcaatcagcaaatgatcgccatcctgacattgaaacaatcccagtttcatgagcggtccatcggctaaatggatggattgctgaatgtcatttgctatcgtttctatcgtttcggcagggttgttttcttcgagtaaagagaacacgtcgaggctgaataattctccttcactgatcccgcgggttctggcttcgtattcatgatctccctgaacatagaccatgcgcaaagcatcgtgatgctcggcaatcttcttcatgactttctgaagcttcgattcgtccaaaccccctttaaaataaagcatgacagattgattataatgatgcggatcagggtattgccgggcgaaaaaccaatgctgaatcggcgtcaataaggtacggcctttgatctccccttgttctgcgattcgggtaatgggctcaataaaaggagcaagcccggagatcgtcgggtgtttgaacaagtgtttgatgtcaagcttatacccggcttgatataagcttgaggtcacctgaatcgacttaatcgaatctcctcccagctcaaagaaatgatcatcgattccgacctgttctgcgcctaataccgattcccacaccccggccagtattttttccagttctgtccgcggagctgtataaggatttccagtgagatttcccgttggagcaggcagagcctgacgatctatttttccgttggaagtaagcggcatcgctgccagctgtacaaaataagcagggatcatataggacggaagttgccgggacaggcgctcccgaatttcgcctgcggttaaagaatgctgtgcggtataataggcgcacaaggatgtttccccgttggtttcttgtgccgtaacgagagcttcttgaatcggcggtatttggaaaaatgcggattcgacttccccgatttcaatgcggtaaccgcggattttcacctggtggtcgatccggcctaaatattcaatatttccatccgggagccgccttgctaaatctcccgtccggtacattttcacctctggcacaaaggggtgctgcaaaaatctttctgctgttaattccgctctgttcaagtatcctctggcgatgccgtccccgctgatatagatttctcccggaacgccggccggcaccggcttcatgctcttatccagcacgaaaatgttcatgttgtccgcggcggttccgatcggcactgattcccgtctgtcgttttgcggatcaaaggaataaatcatacagccgacgactgtctctgtaggcccgtattcgttaaaaatttcgatttttccgccgaattttccgctgatgctacgggcgagccgcgtgcttaaattgtcaccgccgacaatgaatttccgaatggtgcactcagcagggatattcatctctttcaataactgcaagtgcgccggggtcagcttgataatatccgtccttgaatcctgaataatgcaatcaagcaaggcagcactgttttctcctccgtagacaataatggaatttcctgtaattagcggagtgaaaacagacgttatcgtcagatcaaaagcgatggacgaatataggggaaagttggttttttcccctttgacatagacccggcgggcccaccaaatataattggttaagccctgatgctcaattgccactcctttaggcttgcctgtggagcctgacgtataaatgacataagccaaatccttcgtactgctgatcggttccaggtcagagccgtcttcgtggtaagagctttcctgatcgaggaaaaccattgtgcccgcaagttccaactgtttttgaagatggctctgcgtcaggatgatatcagcttgggagtcttctgctatatactgtatgcgatgcttcggataatccggatcaattggcacataggcccctcccgcttttaaaacggccaatattcccacgaccagttcgatctcatgctcgcaaataatcgcagtgagccggtccgtctttaccccctttttccttaacgttcgggctaattgattggcacgttcattgagctgacgatatgtgaattgcttttctccgtaaataacggctgcttgatccggtgttcgtttcatctgttcttcgaataactgataaaccgtcttatcccgcggatattcagttttcgcagtttgaatgtcaacgagaagtgtatgtgtctccgattctggcaaaatatccacttggccgagggggaggtcaggctgaaataatatgacagaaaatagccggtttaaatgtccgagcacctgcatcatatactgacggtcatagacttgttcattaaaacataattttaggtcaatcaagtcttcacccatagcaaactgaaataaagcatctgcagcagccgtttctatgaaaccatcagaatgaatttgctctagtgaaacaactgtatggatgatcggcaaatgatttgcattgtagttcagcctcagctgtccggccattttatcaaagggaacgtcctgatataagatcgcttcgtccagcgtatgtttcaattcatggaaaattgatttaaacgtactgccggaattgatctgctgtttgattaacatgagctggtctgaacgaagatcttcatcagtttcgtcttcaaaggctggaacccctgtaatcactccctcatcccccgtgtatttgtataaaagggattcaattccgaccaggagaaccagatagacggccattggcgtttggttcgtcatggtcaggatgcgccgtgatacctccgcactcaatgaactgtgaatacagtcagatccgcttgttatatcacgctttactgttgagtcggacacttgaaacgaagggaatgcaccgggacggtcttccgtgtgaaacattcggccccagaacaactcctgttgtttgaattctgacattcatatccctccagttggtttcattcctgttttcaggcagctggcggcagccgcggcattcatgccgggacagccgctgcccccgtgattagaaatccaattcgattgtgcttgcgagatgtttacttttgtttactttttcgcttaattgaatgtcttttaaaggaatggatgggtttctcataatcgccgaaaggatcatgacgtaatccttggccaatacagcaatggttttctttttaaacagttttgtacagtaatcaaaactgccctgaatctcatcttgatctattaagaagttcagctgtaaatcaaacttggctgccgtctctgtttgttcataaggcctgactgcgagagagtccacttcaatatccgtttgttccgtattttgcaggacaaacatcgtatcaaacaatggattgcggcttaagtcccgttttacacccagtttttcaactaattcttcaaaaggatactcttgatgttcaaaagccttcagcatggtttctttcgtttccgttatataatccaaaaatgtcttttccgccatcggagcggtgcggatggctaatgtattgacaaacattccgataatgggttccaaatccgcatgcggtctccccgcaataggtgtgccgacgacgatatcaccctgaccgctgtatttagccagcagtatggaataggccgagaacaaaatcatgtaagctgtcgtcccggtcaattcttccagctgctttatcccttgggtgacagtcttatcgagcgtaaaattgtgccttttcccatcaaagcttctaaccggcggtctcgcaaaatctttcggcagctcaaatgaaggcagctcttcatgaaatacaccaagccaatacccttcctgcttcttgattcgttctctttgctctttttgatgtttccattccgtaaagtctttgtactgaatacggagcggagctaactctttgccgtcatacaattgaatcagttcttcgacaaaaatattcatggaggcgccgtccgtgatgatgtggtgcatgtcaaacatgaaaatatgcaggtcttgttctaactcgatgagtccggccctgagtaatggagcctggctgagatcgaacggccgcacgaaggtgcggaaacattcctcaacctcgtcagctgttgccttgtatctttccatcgaaaactccgcttgcggtttgatcacctgcaccggttctccgcggaccagctcaaaaccggtacgcagtgattcatgacgctggatcagtctttggaaagcggtttgcaagcgatttatgtcgagttttccttctaatgtaaggattcccggcatattgtagctcagttctccgccttctatttgtgttgacaggtaaaccatcttctgcacggaagatacaggatagacatcttttgctttggctttcggaatgtaatccggcccgttggtttcagctcctgcaattgcctttgccatttcctcaactgtcggacattgaaagacctctcttaatgaaatgtttttgctgaattgcttatgaattttggcgatgagcgtcatcccccgcaacgagtggccgcccaaatcgaaaaagttatcttttacacctatttcttttaccttcaaaacgtcttgccagatgcatatcagctgctcttccatattcgtccgcggagcaacgtagtcggttcccgtttgtaaacctgcttcaggcatcggtaatgctcttcgatttacttttccattgccggttagcggcagtttctcaagctggatgaagtatgaagggatcatgtatcccggtatttggccagcaagtttttctttcagctgactgatcgagagtgattgctccgctgtaaaataggcatataaatcgatttggccatcggtattttcttttgataggacaactgcttcctgtacgtgcttgagaagagcggcctccacctcaccgagttcaatccggtaaccgcggattttgacctggtggtctctccttcccgcatattcaatgtttccgtcaggaaggtaacgggccagatcgcctgttttatacatccgctgattcgagtcatatgggtgcggaacaaaagtttcgagtgtcaaaggctccctgttatgatagcctctggcaaggctcgctcctgaaatacaaagttcaccgacgattccgacaggctgaagcgttccggcttcattcaaaatgaaaatctccgtatttgaaatcggtttgccgatcggctgaagctcctgatctgtatcaggatcgacggtatacatggtcacaacatgcgtctccgacgggccataatgattatgcaatgtgacttgatggcgtgccagcatgtcacgcagcatacttgttacgatgagctgttctcccgcagcgatgatgtgatccacgcacgcggcaaacggttcgaaatattgtttctctgaggcaaggagcttaaggaacgctgtcgggaggaatgctgtttgtatcccgtgcgttctgacaaaatcattgagctgacgtatgtcacgttttgcctcattgccgatgataaagagtgttcctccgcttgaaagcgcggagaacatttcttgatagcagacatcaaagctcatcgcggcaaattgcagcactctgtcaaagcgaagctgcgtatgatcctgctcataagcgagcagattcgtcatcgtcttgtgctccagctgaactcctttcggctgccccgttgtgcctgacgtgtaaataacatacattaaatcattttccgagcaggaaagattaagattgtctgctctgccttgatatatcatcggatcatcaagctgaagcacttctccttcaaagcgcggcggaatagcgtggcctgcacaagtcaaaagcacaccggcgccgctgtctttcagcataaaagcccgccgtttttcgggaagctccggatcaataggaagaaatgctgcgccggcctttaatatggctaaaatgccgatgatcatatgtgctgagcgatccgtgagaacggcaacaacctgatcagtgcaggccccttatcttgaaggatgcgcgccagctgattggaacgctcattcagctgacgataagtcagtgtctgaattccaaacatgacggcttcatgatccgggttaagctcagcctgctgctcaaaaagctgatgaatcgttgtcggaattcgtttttccgcaactgcagtatcgttaaagagttgctgaatgtctccttcctcttccttggtcatcatattcagacgagccagctcggcatcaggctgtttaataatcgaatcaatcagctgcacaaaatgccccatcatgcgttcgatcgtttccggtttaaacagagccgtcaagtattccattgtgaactgaatacccgactcttcttccacagccgttaaggttaaatcaaatttagccatcgtatgttcgcttggatatggtttgaaagtgacgtcatttatctctaactgttcctgctccgtgttttgaagcacaaacatggtgtcaaacaatggattacggcttaagtctcttgcgatattcagttgatcgatcagcgcttcgaacggataatcttgatgctcataagcttttaatgcattctccttcacctcggacagatactgagagaacgtcttccctttttcagggtaatttctcatggccaatgtattcacaaacattccgataatcggttccaaatcggcgtgcggtcttcccgctataggactgccgacaattatgtcttcctggccgctgtattttgaaagcaataatgtataagacgcaaggagcaccatatataaagtcgattcagtttgggatgccagctgctttaacccggcgcttttttgcttatcaagcgtaaactgcattgtggctcccgcaaaatcccgtgccgacggccggatataatcggtcggcagatgaaggacaggaacgtcgccgctgtacagctctaaccaataggcttcttgattttggatctgttttaaccgcgcttcgccggtctgccatactgcgtagtccttatactggatgcgcaaaggcggtaatgtttctccttcataaatgcggataaattctttaatcaatacactcatggatgttccgtcagaaataatatggtgcatatcaaacatcagaattccgcggtcaggttgaagttcaatcagccccacgcgaagcagcggcggctcatccagatgaaatggacgaataaatttgcggatataaaggtccgcatcattttcttctgcctgataccactctgcttcgaactttgcgtgatctaagacatactgaacgggttctccgtcagccattttaaaaccggtgcgcaaagattcatggcgcaaaatcagcgtgcggaaggcttgctgcagcttgtcacggtcaagcttgccttcgacagccatcagtcccagcatgttgtaactgagttctccgccttccaagtgattcaggatgtacaaccgtttttgtgctgaggataccggataataaggtcttttttcaattgcaggaatcgcagcatatccggtcagctccgtcttcgtgatcgtctgtgcgagctgttcaatggttgggagacggaagacgtcccgcaaaggaatttggacatgcaattgcttttgtatttttgcaatcagcgccgttgcccgcagggagtgtccgccgatctcaaaaaagtgatctctgatccccacctgctctaacccgaggacatcttcccaaattgctgtcagctggatttcttccgaagtttgcggcgggacgtactctatgccgccgtcacgctttttgaccggagccggcaataactggcgattcaacttcccgtttggcgtcagcggcatcttatccagctgcacaaattgagccgggatcatatatcccggtaaatgccgggccattctttcgcgaagttcactgatctgtattgtcttatccgcagcaaagtatccgcacaagtaatattcatcatctgcatctttaagggcagctgcggcggcttcttgaatatcaggaacgttcagcatcaccgattcgatttcaccgagttcaatccgaaaaccttgaattttcacctgatgatcaatccggccgatatattcaatatttccatccggcagaaggcgggccagatcaccggttctgtacattcggtcctccggtacaaacggatcggcaacaaatttttcgtccgtcagttccggcaggttcaagtaaccccgcccgacgccgtcccctgcaatatacagctcgccttggacgcccgccggctgcagccgtttttttgaatcaagaatgtacatgcggtttctgcctaacggcttgcctatagggacatagttttggctgcgtgcccacgcattggaagaacattcaatgttgaacagagacgcgtctacgcaagtctccgtaggcccatatacattggtaatcccaggtgaagcgccatgatcgccgaataattgcatgagcttatttaccgtcgttttggaaagtgcctctcctccgattaaaagatgctgaagcggaactccctgcaaatcacctgcagctatcaaaagctttaagtgggcaggtgttccgtcggtgatgtcaatcgaatgctgccgataataacggcataaggcagcaccgtctgacacaatctctttcggaacaataaacaaggtatgtcctgacagcaaggaagcatacatttgctgaacagaagcatcgaaataatatggagcgagcatggctacattcagctccgcatcgtaggcagagtaaatttggcgtcgaagtccttcaatcaggtgaatgacctggcgatgttcaattaacgtgcctttaggattgcctgtcgtaccggaagtataaatggcataggccagttgactggactgataagagagtgcaagactgctgtctttttggtgatagaaatgttcctccatgagatcgatacatgttcctgagaagccgatgtcatcctgcagcttcccgcggtaaagcaatacgctgatgcttgaatcatttaaaatataactgatgcgttcagacggagaatcaggatctatcggcaaatatgcgccgcccgcttttaaaactcccaagatgcctacaatcatctcaagcgagcgttcagtcataataccgacaagcttatcgttccgcacaccttttgcctgcaaggttcgcgcaagctgattggcacgccggttcagttctccgtaggtgagttgtttaccctcgaatacaaccgctgtattgtccggagtacgatgcgcctgttcctcaaacagctcatgtatcgtttgttcaagcgggtaatgcatgtcattagactgaaagcggctgagcaaatgttctttttcttgcctagagagaagctccaattcttctattttgacagacggctgctgtaatacttgctgcatgagctgttcaaaatgtccgcagatccgctccacttctgatttttcatattcgttttcattaaaaccgaaatgaacggccagctgtttgccaggtatgacaactacattcaaatcatagtgggagtgttccagcatatgaaaattcgtaatgttcagctccgtactatgatgtcccgtctcttcgacctgctgaccgatcggatagttttcaaaaatcatgatatggtcaatcaggttctgcttttgttccgtttgggcctgaatttcgtataaaggataggtatcgtatgattgggaagccagagcgttttgttgaaccatttgcaccgtatcagcaaaagtgctgtcctcatcgcagcggatgcgaaccggaatggtattgatgaacaggccgatcatctgttccacatcaggaatttccgccggtcttcccgacacgacactgccgaagacaacgtctgcggacccgctgtatttctgtaataaaactccccataacgtttggatcaacgtatttaatgtaacctgatgctgatttgcgatctgctgtaattgttttgtctgttcgtgatcaaatcggcaggtcacattggcataggcgtattctttttgttcatgctgctctattttatgaagaagcgtggtttcacctttatatccttcgagatacccgctccagtaccgctttgccgctccctgatcttggcggtcaagccactcgatatagttgctgtaaggagctgccgatgacggttctggttccctgccttcttgtaaggcgcgataatgatcaaacacttccttcgtgataagagacaggcaccagccatccatcacaatatgatggaagctccaaatcaaatgatatttgcggtcttccatacggaaaatcgctatgcgcatcagcggatcccgagccaagtcaaatccttttgccttatcttctctttgataggctgcgattgcatcctctctcaggtgctcctctatatcacgcaaatctgcaaaatgaatttgcggtgtttgcgttttatagacaatttgtaaaggagtatcgttccagccgctgtaaaaacgggttctgagcacggcgtatgtttcaaataatcgttcaaggcttgctttaaaccaatcaatctttaattctccctgcaaatcgaacgatgcttgttcaaaataagaacttgaggcctcgtccagcaggctgtggaagagcattcctttctgcatcggagtgagcggatacacgttttcaacctcacctgcatgcggcagttgaatgaggagctgatccaattcgtcaatggacatgccttttaacaaaatatcgcttggcgtcagttccgattgttctctatggacgcaatgcgtaatgattgtccgcaggcggctttgaatcgtttccgataaccgcatgatcgtttcttttgcgtactgtttgctgctgtagctgatcgtaagcttcagccggccgtcggtgatcattccgtttatattcaatacatacggtctttcttgatttccgctagagtctgaaccgcaagaataagaagataattgaaccccatgctgctgtaaatcttggtcaaactgtcccaggtagttaaagctgatctcaggattgagtttcgatggcattccgccgcttaagtaccttgctattccatatccgatccctttatgcggaatttggcgcaatccttctttggtcgtcttgatataatcagagatctctttgcccggctgcgcgtgcagcacaaccggatacagacttgtaaaccatccgaccgtgcgggagatatctatatcttgtataatctgttctcggccgtgtccctctaaatgaatcggaatttgtttcagtcctgaccaatgcgatatggaaagaccgagagaagttaaaagcaaatcgtttatctccgtgttataagcgcgattcgcttgttttaatagcagctccgtttcctctttcgtccattccacagttgctgtttcactgtcttttgcagttgtatgggtttcatgaaaatctttaggcagcggtttgacttcggtttgttcgatctttgtccaatattcctgttcctgttttatggtttcacttttcgcatattctgaaagtctcttagcccataattggaaagagtctgttttttgcggcagttgaatcactcgcccattctcggcttgcttgtagccgctaacgatatcttccagtaaaatgcgccatgaaatcccgtctataatcaaatgatggatggcgatgagcagatgatctccatttgcgcattgaaacaacccggctttcattaacggcccatcacttaaacgcatactgctttgtatctcatcagctttggcttcaattgtccgtcccggatcggaatcttctttcagattcaggacttctaagcggtacagtccgctttgggcgatttcttcattctgtgcctcgcagccattttccgtagtccggaacgtcatgcggagcgcatcgtgatgttcagcaagtttttgcagggtttgacgaagctgcgtttcctgaaaaccttccggcgcatgcagcatgacggcttgattataataatgctgatctgtcgttatttgttcgaaaaaccaatgctgaataggagtcaggctgacttttcctttgacctcaccttgatcggctatacgcagattctgcttgatatgcggactcaattctgcaattgttgcatattgaaacaagtctttgatttccattttgtatccttgctgatttaatctggaggatacttgaatggatttaatggaatctccgccaaggtcaaagaaattatcaagaatactgacgttttcagcgcctaataccgattcccaggcagaaactaatatttcttccgcttttgttcggggagctttatactctgctctgtcctgcagctcgaaatccggagccggcagcccttttttgtttatttttccgttagaagttaaaggcatttcatcaagctcgataaaataagccggaaccatataacttgcaagggtatgagacaattgtttccggagccgggcagccgttgtttgcccgccgcttacgtaatatgcacacaattgtttaaacccgtggacatcctctctggctgtaacgacagcttccttgatcgcttcttcttgaagcagtgccgcctcgatctcgcctaattcgatacgataacctctgattttcacttgttcatctattctgcccgcatattcaatgtttccgtccgccagccacttcgccaaatctccggtcttatacatcttcgctccgggttcaaacgggtcatcgacaaatttctctgccgttaattcgggacggttcaaatatcctcttgccacaccggcgccgctgatatagatttctcccggcactccgatcggcgcgggtttcatattctcatcaagaacgtaaatgctcgtgtttgccgcagcggttccgatcggtaccgattcccgtctgtcctttacggcatcataacggtaaatcatgcagccgacaacggtttccgtcggtccgtactcattgcatatttcaacccggccttcgaactgttcatgaatgctgcgggctaaccgggtgcttaagttttccccgcccacaatcattcttcggacagccgtttgatcggcaatgttcatttctttcaaaacctgcaaatgggccggagtcaatttaatgatatccaccctcgggtctcgcacaatcgattcaagcagagctgttttatcttctccgtcatagacgatgattgcatttcctgtgacaagcggcgtgaaaatagaagtcaccgtcagatcaaaagaaattgacgaatacaatgggaagttggctttctcgccttttacataaacctctttcgcccaccaaatataattggtcaagccttggtgctcgattagtacgcctttcggccggcctgtggaacctgacgtataaatgacatatgccaaatggctcacatcatttatctgagcaaggtcagagccatcttggtgataagaactttcatcatcaagtaaaaccgtgacgccttcataggcaagctgtttcctgacgtcccgctgcattaaaacgattccggcttgggagtcatccagcatataccgtatgcggtcttgcggatattccggatctatagggacataggctccccctgattttaaaacggcaaggattccgaccaccgattcgatgctgtttctcgtgatgatggctacaggctgatccgtctggactcctttcgctcttaacgttcgcgcgagtcggttggcccgcttattgagctctccgtacgtgagctgcctgtccttatcaatgacggctgcttgatcgggcgtacgctgcgattgctcttcaaataattgatgaaccggcgtctgcggaaacggcgcggccgtgtcgttaagcgtctgcagaagggttcttctttcgccttccgttaacaattccgcttgatccacccggatatccgcatttgtcacgacttgttgcaggatttgcatgaaatgttcccgaacccgctctatgcttgcccgatcatacacatttgcattgtattcaaaagagatggtcatctcgtcgcccggtataacggtcaaattaaaatcgtagttggtctgttcttccatttgcacgttggagatcgtgatggatgttccgttctggcggcctatactttccatatactgatcaaccggataattttcgaatatcattaaatgtgtaattaaatcttgtttttgcgttgtgcgcgcttgaatatcgtacagcgggtgcgtctcaaattgttgagacgctacagccctttcttgcgcctctttcataagctcggcaaacgttgttccggcttcacaccggaaccggacgggaatggtgttaatgaataagccgatcatggtttccacgtttggaattccagcaggtcttccggatacaacacttccaaacacaacgtcccggctgcggttatatttctgcagcaaaaccgcccatgccgtctgcagcagcgtgttcagcgtgacatgatgctggcctgccgtccgcttcattttcgaagtgagatcggagcttatgtcacacgtcactttttcaggaacgtatcgtccgtcttccgctgcatggtgatccttaggaaggccggtttgctcctcatatccctccaagtattgatcccaataagccgtggcctttttcgcatcttgccggccgagccattcaatatattgactgtacggagtaattgatgattgttcaggctgcttttgctgaagcaaggcaaagtaattctcgaatatttcttttgtaatcagcggcaggcaccagccgtccatcaaaatatggtggaagctccagataaaacggtatgtcttttcatccgtacgaaggatgaatagccgcattaacgcgcctttttctaagtcgaacccccgcatcttatcttctctggcatactgctgaatcatcgcttctttttgtgattccttcatctctcgtatgtcattgaattgaaaaccgatttttttcgttttgaatataatttggagcggctgatccttccagcctctgtaaaaattcgtgcggaaaatatcatatttttgcgataagccgtccaagctttttgaaaatgaatcaatctccagatctccatgcagatcaaacatcgtttgctgaaaataagcacctgaattcggatcaaataagctgtgaaacagcatgcccttctgcatcggcgttaatggataaatattttccgcttcgcctaattcacgcgtctgctccaaaagctgttccagttcgtcgattgagatatcttttaacaggatgtcacttggtgtgagagaagtctgctgccggcttacgcaatgcgcaatgacttcttgcagactttctttcaacccttgggcaaattgcgccatagtagatctttcgtattgtttgctgctgtagctcagtgtcagtgataatgtcccttcggcaatcatgccgttcaaatcaagcacggccgttctctcttggttttcgttcatcgataaccctgtggaatatggcgatatgcgcaaagcctgatgcttcaggtcttggtcaaattgtcccaaatagttaaacgatatctccggattcagctgcatgctgtcggcttccggatgcccggatatatatttgatgatgctgtaattcattcctttatcagggatgcggcgcagcccttcttttacgatcttgatccgctgcgacaggtcttttccggcttccatcctcaggacgacagggtactggcttgtgaaccatcctatcgtgcgggaaatgtcagcatccggaataatcggttctctcccgtggccttccaaattcacgacaatgtcttccgtgcctgtccacttgtgaacagccagccctaacgaagtcagcagcagatcgttgatatccgtgttgtaggcgcggttcgcttgttttaataattgctccgtttcctcttttgtccattgaatcgtcacttcttcgctgtcacttaataacgatccttcgctgatagtgtccttaggcaatggctgaggctttatgcttgaaagctcagtccaataagcaatctcctctttcatgtcggtttccgccgcatatttggacaattgatcggcccagaatggaaacgaatctgttttttgcgggagctggatcgtttgtccgcgttctgcctgctcataaccgcttgcaaaatcttcgagcaaaatacgccaggatactccgtcaatcagcaaatgatgaattgcaatcagcaaatgatctccgtccggacattggaacaaaccgagcttcatcaatggccctttgtctaataccatgctgctttgaatctcattcgctttatcggcaatcgcttgagccggatcggtttcccctttataattcatcacttccagatggtatagttcactttcatctgttcctgtaattcgcggagcgtatccatccggcgttttttcaaaaatcatcctcaaggcatcgtgatgcgacgcgatctgttccatcgtccggcgaagcggagcctctttaaagctttccgccgaatataacatgacggcctgattgtaatggtgtgcatgcggcatgttttgttcaaaaaaccaatgctgaatcggggtcagcttggttccgccattcacttctccttgatcagccaccctgctgaccggcgctacaaactgactaagttcagcaatcgaggggtgtttaaacaaatgcttcatatcaaccttgtatccggcttgatacaatctggatgacacctgaattgacttaatcgaatctccgccaaaatcaaagaaattatccagaattcctatacgttctgcccctaatacttcttgccagatagacgccagcagttcttctattgtgttccgcggggctatgtattcgtattccgcccgcgtattttcgtcagcagcaggcaaagctttcagatcaatcttcccattggaagtgagcggaatgcgttccaatgggataaagcgggagggaatcatataattcggcagttcccgggataattcttttctgaactgcgcagcggtcaaagaaggcccgccgacataataggcatacaattgtttggccccgtctgcgtcttcccgcgcgacgactgcggcttcacgaacgttttccagattgaacatggctgcctctacctcgccgatctcaatccggtagccgcgaattttcacttgatgatcaatccgccctaaatattcgattcttccatccggcagccatctggcgagatcacccgttttatacatcttttgaccagggacatgcagatgctccacaaatttttcctccgtcaattcaggacgattgaggtagccgcgggccactcccgctcctccgacatacagctctcccggtacgccgatcggctggatttgatggtgcgctcctaaaatataagcttgatggttggccaccgggctgccgattgtgatctgttcatcagcggactgaacagggtgaaatgtagataccacgctgttttctgtcggtccgtattcattattgatccgaatgcgaggctgcagagaatgcagcttctcaactgtatctgtttccagctgctcaccgcctacaacaacatgctgaacatggatgaagtcctctgtgttcatctgttcgatcatcgttttcagaagacggggagaagttgagaaatgagtaattctctcttgttttatggcattttgaatggcgaaagtttctttattctcttcattaggcaataggtgcaaagttgcccccgagatgagcgggccgaagaaatttaaaatgaacgcatcaaaaacatacgggtacaagacaagcacgcgatccgccggagaatgcttaaaaaacgccttcttccattggagcgaattcacaatgccgccgtgttcaaccatgactcctttcggctttcctgttgtacccgacgtataaatgacataggctaaatggctgtgtcccgttgctggtgataacaatgagctatcggcatggtatgatgtttcatcattcaaatcaatcaccgggccgtcaaaggtgagactgttttttaaatgacgctgaacaaggagaacgtctgcatccgcatcatgaagcaaatattgaagccgctcttttggatattcaggatccaggggcacataagcgccccctgccttccaaacggctataatggatacgatcatctctaatgaacgatcagcgagaatggcgactaacgtatcgggttgaaccccgcaattacgcaatgttcttgccaaacggttcgccttctcattcagttccctgtacgtcaaatggtcgtttttaaacttgacggccgcatgctcaggcgttctttctgcttgctcttcaaataattgatagactgttctgctcccggagaaatctctgacggtgtcgttaaaatcaaacaatagcttctgtttttccgcttccggtaagatctctgccgtatggatcgcggcttgaggctgaaacagaatcacagacagcagctgatccaaatgggacacaatttgattgatatagcgctcatcgtacagattgccgttataaaaaagcttcaaatgaatcccgttgttctccaaatcaaagtgaaacagcgtatcggctgcagtatcttctttaaattgcaaggaatgaatttcgttaagcgaaacgacggtatgaatcaacggcagatgctcgtcattgtattgcacgctcagatgctgaaccatttttctaaacggcaggttttgatttttcagagaatcattaacggcttctttcagctgcccgaatacggttttaaatgtactctcgtttgaaagcgtattttttaagaggacaatgttgttaacggctgactggccggctttttgcttcgataccgtcggaatgccaagaatcaggctcgtttgatccgtatatttatataacaagcattcaatacccgccaataaaatcagataggccgccatatcggaatgattcgccattgtcatgattctttgagatacttccggagataaggaacggcagatgcatttttcctggtagccggtacgggcaaacgacgctttatccgctgctttaaagtaagggaatgcgcttaatccgtcttcttcatcaaacaggttttcccagtacgtttcttggtttttaaataccgacattggagcacctcattttatataatttaaagaaataatgcttttccctaaaagttcaattgaatagaatcaagcgcgttctcttcttcctcattgctgccgctcaatccgatatgttcaattagaatgcttggctgttccaaaatcgccgatagaatgtgtaagtagtcgtttgataaaacctcgattctgcttttcttaaacagttttttcgaatattcaaacagtccgtgatagttgtcttggtccgcctgaatcgacaaggtcaaatcgaatttggcaaccggatgatgaaatgaatacggcttgagttgaagagaatcgaaagtcaattcagcatgatcgagattttgcagcacaaacatcgtatcgaataaaggattgcggcttgaatcttttggaagatgcagatgctgaattaattcttccaatggatagtcttgatttttataggcgttcagcatgttttcttttacttcgtttaagtaggcatcaaatgttttacggcccgccgggtgattgcgaatgactaacgtattgacgaacattcccacgaccggctctacatccaaatgagtccgcccggcagatggcgttcctacgataatatcttcttgtccgctgtacttggataaaagaatcgtataggccgccaataaaatcatatacagtgttgctcctgtgtcttcttccatttggcttaaacgctgtttcaagtgttcgggtataagaaattcaaatgattcgccttcgtaatcgcgtatggcaggtctctcataatccgcaggcatatccagtacaggaatatcactgtgaaactgatccagccaatacgcttcctggctcttgatgttccgtttctgaatgtccgattgctgccaaactgcaaagtctttatattgaatagagagcgggtccggttcgttcccctcgtagattcggcttaaatctttcatcagaatattgacggacacgccgtcagaaatgatatgatgcatatcaaccacaagcacgtgccgtgcaggttcaatttcaatcagtccggcccgcatcagcggcggtttggctaagtcaaacgctttgatgaaatcaagcacacggtcttccgctacttcttcgcttgcttgaatccgttctatcgtaaagtcgacgttctgatgaatacgctgtgccggctcgccttcatataaatcaaagctggtccgcaacgcttcatgacgcgcgattaattttcggaaagcggcgtttaaccgttcgggatcgatcgtcccttccacattcatggcacccgtcatattgtaagtcagctcgccgccttctgtgtgacttaacaaatacatacgcctctgagctgaagaaaccggataatatggcatttcctttgcagccggaatcggtacatatcggtttttgtccatgtgtaacgccttgtcagccaattgttcaatggtaggaaacttgaatatgtcttttagagacagattcacatccagctctttgtgaattctggcggctaaggcagccgctcggatggagttgcctccgagatcaaagaaattatgtttgatccccgcatggcttattccgagcacttccttccataaatctgtcagtttggactccgtctcattacccggcggaacatattcagctgtcagctgcagactcgcttctggtgctggcagtgccttacggtttattttcccgttggacgttaacggcatatgctccagttggacaaaataggacggaatcatgtagtccggaagctccgatgacaattgttccctaagctgcgcagccgctataggcttgtcgcttacgtaatacgcgcataattgttttaagccgtcttcttcttctttcactgtaaccgcggctttttgcaccgcttccgcgttatgcattgctgcttcaatttcaccaagctcgattcggtgtcccctgattttgacttgttcatcaatgcgcccgatatatacaagatttccgtccttcaaccgcttagccaaatcccctgatttgtacatcttcgctcccgggacatacgggttttcaacaaatttctctgccgttaaatccggacggttccaataccctctggcaacacccggtccgctgatatatatttcgccgattaccccgatcggaaccagatttctgcttgcatcggccacataaatatccgtattggcagccggagtgccgatcggtacaaattcccgcttgtcccgttctgcgtcgaagtgataaatcatacatccgacgacagcttccgtcggtccgtattcattaaaaatgtccagccggcctttaaactgctcgctgacacttttggccagacgggtgcttaaattttctccgccgacaatcattttccgtattgcggtgccgccaccgatattcatcttcttgatgacgtgcagatgtgccggggtcaatttgatcatgtctattcttgagtcccgcataatctcagaaagcacagcgcttttgtcttcgccgtcaaagacaatgatggtatttcccgtaaccagcggtgtaaatatcgaggtcacagtcagatcgaaagagatggaagagtataatgggaagttggttttctcacctcttacataaacctctttcgcccaccaaatataatcagccagtccctgatgctcaatgaggacaccttttggatttcccgtggaacctgacgtatagatcatgtaggccaaatcatgcgcatcgctgtccgattcaagattcgagtgatcctcatggtatgagttttcctcatccaaaagcacaacgtcaccatcatacggtaattgatccagcaggctgcgctgtgtcaacacaacctccgcccttgaatctctcagcatatattggatccgatcttccggatattcaggatcaatgggcacgtatgcgccgccggctttcagaacagccaaaattccgacaatcagttcgatccgatgcgggcagatgatggcaacgaattgatccgcttgtacgccttttgtccgtaacgtccgcgccaatcggttcgcccgttcattgagctgtctgtacgtataccgctcattgccaaaaataacggcttcctgatcgggactctgttccgcctgcatttcaaaccatcgggttactgtttcgttatgcggatacggcgtctttgtgccgttacactccgtcagcagttgatgccgttcggtttcagacagcataggaacggaagacaatgtcatctccggctgctcaacaagactgtttaagatgccggtatagtgtctggtgatctgttcaatggtgtcttttgtgaatcgtcccggtttataatcaaaatgcatctctatctgttgaccggcatcttcgatcgtgagcatcaaatcatacaaagagacccctggatttcgttctttcactttaaatgtacattcattgtgccggatttcatgaaattcaatgttttgaaacacaaacatcgtgttaaacagagactttccggttgtttcccgctgcacatttaatttctccacaagccggtcaaatggatagtcttggttttcgaaagcgtcaagcgtctgccgctttacttcttccagataatccgtgaacgttctattggcgtgcggcttcgtccggattccgatggtttgtatgaaaataccgatgatcttttcgatatccggatgatttcttcctgaagcaggcgtgcctacgacaatgtcttcttgtccggtatatttatgaagcagcacattataggcggccaggagcactgtatagagagtggtttccgccttttgcgccaaatcttgaagcgaacggatgacatccggctgtaaggagcatgtcactcgctgtccctcagaagaccgttctgccgcttttgaaccgtctgtcggcaggttaaggatgggaatttcgtcttgaaattgttccagccaatatgtctcctgccgcttcatggcatcctcattcagccgttggttttgccattctgcgaaatctttatattcaaattcaatgtccggtaatggtttctgatgatataaagccagcaattcatttgtaaggatgttgacggaataaccatccgaaatgatatgatgcatatcgatgagcagttcggcctgctcgttttcaatcttgatcagctccgcacgaactaacggagcttggtccaggcggaacggttttacaaaccggtctgaataggcatcaaattcgtcccggctcattgtccggacatgaacgttaaaatcaacttcgttttcaagtttctgaacgatatcgccatctataatgtcgaaatacgtgcgaaacgcttcgtgccgctgcatcacttgttgaagagatgagatcagggcttgctcatcgtacttccctgttattgatatttggccgaacatattttgcgccagctgatccggttccagttggtgcaggaaatatactctttgctgcgccggcgatgtcgggtaatacgcttttttctcggcagccttcatcgggaggtgcacgacttttgtttcgttctgaatgaaatgtgctaattccttaacagtctggtgattgaaaaattgtccgatggaaaccttttgatgaaatgtcttctgaactttggaaagcataagcgtcgcctggagcgagtttcctcccagagccaggaagcgatctgatctgccgacccgttcaaggccgaaaagttcctcccaaatccgcgccagctgccgctccgtttcatttatcggcgcctcgtaggcttcagtgaaatttgctgtattgcttcctattgaagagacccgcttctggtgttcggcataaagtgcttgtaaatcatgctgttcttcatcggaaaacagcatcatggcgtcaagagggattgaatctccctcaaccattttttgcagcaattttgtaaaacccgctccccactttttcatgatttccggactgatgacgttcgtattaaagtcgaaatcaagaatatattcttgatgcgcgtctgttatgttaagaaataaatcgtacagggtgcattttaccgggtatgcaacgggctccgcttccgcctttccgaaatgcagctttcgaaaaggcctgtctaaattaaagataatacgcatatccggcacttgatcgtgcggaagctctctggccaccagtgttatcgggacggcttggtgccgcattgcaagattcacgctttctttcatactgccaagataaccggttaaagtgctttctgaagtagacgtgttcttcaccggaatcatattgacgcaatttccaatcagatcatgctgttttatatgcgattgacctgctgcggggatcccgatcacaaggcctgactgtttggtaagccggtgcagaaaaagatgaaatgcacccagcattgtcacaaatacgctatttttcatctgaatgcttaatgaccttaaagcctcgctcaatggccgtccaagcctgacggtacaccggtctccctcatacccgttcggataacggacagaacctgtgctcggcagaattggctgctgaatcggttcagagaaatgacgccgccaataacggaccccttcttcataatggccgctgtcaatctgtgcctgctgccagtctaagtattggcgaaacgaaacatctgcctctttcggtgaaatcggttttccttgtacgattgccgcgtagttgctctccagttcttgaacaaatacggcgattgaccatccatcgacaatgatatgatggaacgtgagcacaatcagatgttcattgtgagccgatgtaagcacatggattctaaacaaaggcttttgttcatggaaatggaacggccgcttggcatcttctgtcagccatttttgaatttccgactgccgatgttcatgcgggtgaacagtaaaatcaatgactggtatttctatattcatccgtttctgcacttgctgtacctcgtcatcgggatgaatcactgtacgtaaagcttcatgacggccaacgatatgccggacggcttgttttaatggtgtatgctgcagttcgccctccactttcagcataatggactggtttaaagcggcggacgcttcattcccgtaatgggatgccataaccaattgtttttgttcatctgaaagctcgtacgcccctgatttgttatgtccgccgtcatcaggggaatccgggccttccggaataaatccgcctcggcgaagatccttcaccgtgtctttaacagcttgaatgatgtgttcaatatcatccgcggtatgcgccgtggataggaagcagttgcgtccttcccacacatagatccctttataattgagatggtaaaagaacaagtcgttatcaagcgatgagacaaaccggaataaagaaccgaattgaaccatgcggataggcacttgcgattgttcaaagaagcgattcagccgatcaaccagggaggctgttttttgattcagctgttcatacaggtgttctccctcggtttgtaaatggcgaagcacggctaacgacattctcatggtaagcgggtgagtattgaaggtgccggccacaaacgtgcgtttcgcctcatcttgcggataggaatcgtccccatactgccaggtacccccgtcgatcgcattcatgaactcagcttttccggcaactacccctaacggctgtccgccgccgatgatttttccgtaggtcactaaatcagcctgaatgccgaaccattcctgtgcgccgccgagaccgatccgaaatccggtaataatttcatccataatcagagctgttccggattgctgcgtgatcgcccgcaattctttcaaaaatgcccgcggctgcaaatccggtctgcggctttgtaccggttccaccagtacggctgccaattcatcaccaagactgcggatcacgtccagcgaatcgggattgttataatgtaaaataatcaaatcatccataaagctttgcagtatacccggagccagcggattcgcagacgcggctccgccttttgtgccggcaacccctaatacgccgtcaaacgtgccgtgataagatcccgagaacgccacgactttctttcttcctgttgctgcccgcgccaaacgcagggcaaccatgacggcctctgttccggaattatagaaagcgaccctttccactccggtacatgtgcggatccggtcggcaacttcaccggcgacatctgacatcgggccgagcggaggcaatgatgaacgggctgaatcatcgataacctgtgtaataaaggaaggatgatgcccgaaaaggttaaccccgaatcccatggtgacatcgatatattcatttccgtcaatatcccacattttagaaccgtcagaacgttcggcgataatcgggtatacgatttccttccaatacgaacggaagctggacaagttgcggttgtttgcatgagcaaatcgggtgttgtccgtatattgtttggaacctttcgttttatctgcgtatttcttgatgaaatcttctaagtattgtttttgccgtgcggtatagtgtccctgttcatgcaggttctgaggctggaaaggaacatagggtttcgcttcttgagccgctttcttttctgcagtgacggccggaggcccctgcttgacagaaggaattgatttctcttgcgctttagcgtattctttctcatcggaatgatgtccgctgtttctcaacaaattaaagctatttaattgagcttgcaaggtatcctgaattaattgattctgagaagcgattattttttcaagcatatgctcttgttgaccttctctgcgatccgattcagactgtgcttctgaaatgacctgtatttcctgcgccggaacattctcttgaggcggagcggatgcaaaggacgatggaacggtctcagccaagtaatctatgacactttgaaggttgttcatcgtatcaaaaaaacgatccattgggatgtctgccccaaattcgtccgcgatggcttttttgacctgtgacagcatgatagaatccattccgagcccgataaaatgagcattcagatcgagttcctccgctctgatccccgaagcattgctgattacagttttcaggaaggattcaatgtgcgacttcgattgattgatattcaatgccgcttctcctctcttttcgtcctcgtttaagcgcaattggtcagcttcagcccagcatcggctccgttcaaacggatacacgggcaatggcgtcttttgtacagtttcacctgaataaagcgcgcgccaatcgataacggctccttgcacaaataattcggcggcgcgatgcagccatgtgatccgttcatcttgcgtacgtaaacgctgcttaatcagtgcggctgcttgtttattcagctcttctttatgagcgggcagcatttccttcatattcttgtagccgatgtatacaccgggaaggtttctgtctccctgaatcaggcgggtcagcttatccgatagttcttgtttaccggatacaatcatggcaatgccatgatccaaatgagtcctgcccgtactggctgtatagcaaatggactttaatgaagcttggctgtcatccgatacatattgccggtactgctgtgcgagttcatagagtgatttttcagtatgagcggataaaacaaataggtgcggcccatgttcatcctcgggcgcatactcactttgagaaatatattcttccaataccacatgagcgttcgttccgctaaagccaaatgagctgactccgcctcgcagcggctcatcaccggatgggaacgctgcagcttcctggtttacgtaaaatggtgaagagtgaaaatgaatgagcggattaggttcattaaagtgcactaacggcggatttttcttgtgattcagcatgaggacagatttgatcagcccgacgatgcctgccgcttcaaacaaatgaccgatgttcgatttaacagaaccaatcgcacaaaattgtttttttgccgtatacttttcaaacgctttacaaagcccgttaaattcaaccggatcgccgagcttcgttccggtgccatgcgcttcgatgaaagacagtgtttcaggggcaatgcccgcgtctttccaggccgtctcaatgacctcagtctgagctgccggattcggtgctgtaatcccggcggttgttccgtcttgattcaacgcgcttcccttgattacgccgtaaatatggtctccgtcgcgaacagcatcctgcagaggtttcagcaggactgcggccgcgccttcacctgtgccagtaccgtctgaatctttgctgaacgttttcgtgtacccgtccgaagattccatatcaagtccgatacagatcggcaagagcgatgtccggataccgccggcaagagccatttcacaatcgccggatattaaagatttacatgccatatgaacggcggcaagcgatgaggagcacgccgtatcgactgtcaccgccggcccttttaaatttaagaaataagcgattcggctggctaacacggaagggagattgcccacgatatattgatgaagctcctccggataattcgcagaaaggagacgttcataatcgtagcccaccttcgagtaccctgcatataccccgacacggctcccgttcatgctgccgccggcatagcccgcatcttcaatcgcatgccatgcagactgcaaaaacagtctttggttagggtccataaactgagccgttttaggagctaaaccgaagaacgagtaatcaaagcggtcgatttcatctaaatagccgcccttcacaaactgattctcattgatttcgctttggatggactttaaataatccgccgcatctttcagccgggatgcagggtattctcgaatgctgtgctcacctttttcaagcagattccaaaaatcatttttagttgatgctccagggacattgagcgacatcccgataatggcgatatctttcggcgtcacgtggcttggtttcgctgccacgtcctgcttgatttcagcccggctttcagacagatatgccgctaaatcagtgatagaaggatacgtaaagagatctgaaacggcaagctcgcgtccgaatttctgttctatgcgctcggcaatctgcgataactgtaatgaatttgctcccatatcaaaataactgtcagcgaggtgaacctttttcccattgagcacatcggaaaagatagacagtaattccgtttcaatttcatgaatgggagtctgtccggacgtttccgggctgctctccaaatattcattgatggcggcagactctgttgaaaaattccctgcctcatactgtctggcaagttcgtagcgtttaacctttccgctggttgttttagggagttttcggatcggaaggacatcttttatgctccagccgccccgcttgagcaaatgcttttttatctctttgacaagcggtgcgaatttttcaggtgattttttgtaaacaacaaagagcacgatttctccgctttgtgtcttttgatcatatacaccgcaggcggcaacccttcctaagtcaacctcttccatttcaatcgcgacccgttcaatatcgtgcgggtagatattttttccgttcacgaaaataatgtccttttctcttcccgttacgactaagttaccactttcactaatgaatccgaggtctcccgtttttacccagccgtcagaagtcagcgctttttccgtactctcggggttgttataatacccttgagtcacattgtctcctttgatctggatatggccgatgattccgtcttctactctttcatttgcttcatcggagatccgaagctgacaatagtcaataggtcgtcccacttcgacgaatgaagcgcaattttgatcctctttgctgacgtttacagctctttcaccaagatttaaatagtcacgatgcaaataaacgggaacgaattctttacctaatttagagaatgctgcgccgaccgaagcttccgctaaaccgtaaacattcaaaatggcggatcttttcagattgaatgctgcgcatcttttcaaaaattcgtcacagagctccggcaatatcggttctgcaccgtttgcgatgaccttgatgtgggataaatcccagtctggttcgtttttcagaaatttaaggaagtagttgtacccgaaattaggagaggatagaatactggctttatgttcatgagcttttttcatccaaagaataggtctgcgaataaataattctgtaggcattagattttgattgattccggttatgaagggaacaaggtggcaggcgatgagccccatatcatgcgttaaaggcatccatgataagaaagagtctttcgaatgaacggctagggcattcccaatggcgcacgtgttatgtattaagttgtgatgcgttaacatgactccttttggatctcctgtcgatcctgaagaaaattggataaaggcgagttcatccgcatcaggttcataaaacgaagcggggtaatcgtaggtttgatcttgaatgatgtcagatttttcgtttaattgatgatggaaatcctgtaaatcgtgttctgcagcgtatttctttattttgtccaatactttttcagaggcaatcagaaacggatgatttaatatattccaaatgcgccagaccttcagcttatggtcatcatcttctccgatactgaccggcaccgggatcattcctcctaatatacaagcccaaaaagcaacgacaaatgatttgttttcttggatttgaaatacaatttcctgcttcggcttaatgccgagatgctgtaaatagccaagatacccttgcgcctcttcaaacaattggcgataagagacaaccgtctcgtttttatcggattcgataaaacggatcccgcgatcagagatattgcttctttcccgaatgacttctactaaggtttggaattgactggtatacataggtcccctcctgggcgctttattttaaaatccgcaattcttcccaagccggaagctgtttagcttcacaaattaatttgcataaatggatcgaatggttgagctcttgttctgagagctcattttcatgtctttccattctctctttcagctcttggatttgcgtaaataatgccgtcgtcatattggaataagccgctgaatccttgttgtaatttcgcgcaatgacggattgaatcatcaatttattcagttgttttttgcgtaaacggacaatatgtttctttctttccgctgaattggaaagcaagtgaacatcagatgtctgtcctaagggataaggtacaatgtgattcgttgtttttctcagcagaccggctaaaacattgttcggacccatttcgatgacttctgtgactccgtgtaaaagcaagtaatgcatcgattccgtccatcttaccggcatcgtcatgtgctgcttgagatgttcgctgatcgaatttccgctgctgtaagggcgtgcggtgacatttgaaatgatcggccatgcggcatcccggaaggaataccggtgtaatacagtctggaattgttcagatgctgatcgtatcagcgaactgtgaaaaggcgcactgacattcaaataagtgtatgccgctcccttttcctccgccatcttgatgacacgttccacagcttgccggtgtccggaaatcacatgctgctgttctgaattcatgcaggctactcctgccggaaagtcttccgtcgacactttcgaacatatttcctgcaacgtttgaagagagaggtgagtcacggcggccatcgtcccctgctgctgaggatccgcattttgcataagaattccccgctgccttacaagtgtaacggcatcctgaaaagaaagggcgccggcacagacaagcgctgaatattcgcctaagctatgacctgccaggaagcggggcttcacccctatttcctgcatatacacttgaaaagcaataacactgaccgttaaaatagcgggctgcgcgttcattgtctttgtcaattcattcatatctccgttaaaacacagtttttttacatccaaggagatcgcatcgctcgcttcttcaaacaatctctttgcgagcacaaaatcattccaaaattgtttgcccattcctacaaattgagacccttgtccaggaaataaaaaggcaagattgttcatgagattcctccgatcatattgaacagaaatacaatatcctacaaattatccctttatctaacatcctagcatgattataacaaatgtgtatagaatactttcggaggagttattgttcgattttacaaacgaattagatatatttattcataaaataaaacatggggtttcaccgaaaatcagtcttaaagagagatgatgaaaagccggagtggagcctgttaccggctcttcatcacttaggtcgcgctcttcatgtttcatatgttttagggctattggcattattgtgtcagaaattacatattttatgtttattgtaaaaattcatttgtatatctgtgaaggattgtaaactgatggcgcttgattataaatgcggcgcagaaatggatctggatgagaaaaatctgcaaggacaaaatacgccgcagaacatgtgaatgacccagcccggataccggttgggcagtaaatcggcctattgagtgaacaagtttttcaggcataaaaaaacagccgttcagagcggctgtttttaaaaaaatataagaactattgagcggtatacccgccatccatgactacggcctgacctgtaaccccttttgctttgtcgctggccaaaaatacagcgtaatcagcgatttccttcactgacagcagccgtttttggggaacgagcggaaagatgacgtcctcaagcacccgctcgtacggtacattccttgttgcggaaatgtcctttaactgattgcggacaagctgagtgtccacatatcccggacaaagcgcattgacggtaatgccgtcagccgcgccttcaagtgcaccgactttcgttaaaccgatgacgccgtgcttggcgctgttatatgccgctttcccgtgaaaaccgatcagcccgttgacagacgccatattaatgattcgaccgaattgctgttttttcataatggggaatgcatgcttcattgcgataaatggcgcagtcagcatgacacgaatgagccgttcaaactgttcggtgggaaattcctcgatgggcgcgacatgctgaatgcccgcattattcacaaggatatcgagacgtccgaattgtttctcgaccgtctgcagcatgtcggccacttgcttttcatttgttacatcgcatgtgatgctgactgcttcacagccttcatctttaagtcctgccgccgcttctttccccgcttgttcgtttacatcagagatgatgacggctgctccttcacgggcgaattctcttgcaatttcaagcccgattcctccggctgctcctgttacaacggctgttttttcaataagcaatgaatccatggcggcacctcctcattttggtctgaccccgttttttaacgactggctgacagtaaaatgaccttctgttttctcaaagacctcctccattgttacaccttcctgcagttcggtgagcgtcatacggccatcatgaaaatcgaatacagccaaatctgtgatcagccgatcgaccacctgcctgccggttaaaggcagcgtacattccgttctcactttagattccccatatttattaacatgctccataatgacaataatccgttttgctccgtgcaccaggtccatggcgccgcccattcctttgatcatttttccggggatcatccagttcgccaaatctccccgttcggacacttccatcccgccgagaatcgctacatcaatgtggccgccgcgaatcatggcaaaggattcggcactgtcaaaatacgaggctccctttacctcggtaatggtttcttttcccgcattgatcagatcggggtcctccgttccttccgccggataaggcccgatcccgagcaagccgttttcagactgaagcaggacgttataatcattcggtatctcattggctacaagcgtcggcatccctatccccaagttcacattcattccgtcctttatttcctttacagcccgtttgatcattcgttttctgctatctctcattctgtcagcctcctttatcatgcttgccggacggtgcggcgttcaatccgtttttcatgaatcccgccaagcagcacatgctgcacaaaaatacccggcgtatgaatttgatccggatcaagctctccggcatcgacgatttcttcagcctctgcaatcgtcactttgcctgccattgcagcgagcggattgaaatttctcgccgtctttctgaacatcaggttgcccagaggatcggctttccaggcctttatgatggcggcgttccctgtaatccctttctccagaagataggtgcgcccgtcaaatgtcttatgttcttttccctcggctactgatgttccgacgcccgcaggtgtataaaacgccggaatgcccgcccctcccgcgcgaattctttctgcgagcgttccttggggcaccaattcgacttccagctccccgcttaaaaactgccgttcaaaggttttgttttctccgacataggatgcgaccatttttttgatctgccggtttgcaagcaagaggcctaacccccaatcatcaacaccgcagttattactgacaacggtcaagtttttcacgccgctgtccctgatcgcgagaattaattgttccggaatgccgcacaggccgaagcctcctgcgatgagggtgtctccatccttgatcagtgcagcagcatctttataagagtccatcacttttccttttcccatattcgtttcccctttctgttttggctacacaaggcccgtcagactgtaaatggcgatgatgacaaacacagctgctgttttaatgacggtaatggcaaagatatccctgtaggattggcggtgggtcaacccggtgaccgcgagcagcgtaatgacggcgccattatgcggaagagtgtccattccgccggaggccatcgaaatcacccggtgcatgacctccggcggaatgtggaatgtattgattgcttctgtatatgctgctgacatcgtgcttaaagcgatgcccattcctcctgatgccgatcctgtaatcccggcaagcgcagtggtcgtcaccgctccgttgacgagcggatcagtaaacgtctgcgatatgccgctgctgaccattttaaagccgggaagcgccgcaatgatgccgccaaatccgtattcggctcctgtattcatcgacgccagcaaggcaccccgatgccctcattcagtccttctttcaaattgaagagcacttttttccaatcgaacaaaatcgttgtcatgattccgatgagcagtgcgagttctactgaccagatcgcagtgacggaggaaaggtcaatcttcccgaacgcttttaaaccgagctgcgcaaaatcaaatccgtcagggtaccaatgcgggagccacatcgtgaagcatttgttcatgatccccacaaggataagcggaacaaaggcgagcacttgccgcgcggggctgggttctgcctcctgcggtaaaacaggcgtatgtttttcattagccagacttgaggaatcctctgcagcggaaacttcagattgaaatccagcatagccttctccggcattggccgcttttttgcgccgggattctaaataaatcattccggccgtaagcacaaatgctgcgccaatcagtccgagccagggagcggcataaatgtttgttttaaaaaaagctgtcggaatgacattttgaatttgcggtgtgccgggaagcgcatccattgtaaaagtaaacgcgcccaatgcaatcgtaccgggtatcagacgcttgggaatatcagctttaataaataggtttttagcaaacggataaatggcaaacaccgctacgaagagactgacgccgctgtacgttaaaatcgcacccattaagacgatggcgagaatggctctttttgctcccacaagcctgacgattgtttttgcaatcgactcggcgagcccggatatttcaacaaccttgccaaaaacggcccctaaaagaaatacgggaaaatacagcttaataaatcctaccatcttctccataaatatattcgagaagaaaggaagtacgaagcttggatctgtcaggagcacggcaaacagcgcacaaatcggggcgaataaaatgactgaaaagccccggtaagccgcaaacatcagcatgcctaatgccaataaaataataacaatgtccacaaatccccctcttttctgctcaatattagtaagcgcttacaaagatcaagaaaataaagcagaaaacatgccgattttgcaccgtttctgaggctgaaaaaatgtgcatcatggtgaattttccgttttggcgaaagaaaaggagattcttgctgtatgatattgaatggctgagcagcgagtttttttagggatagtgagatggatcagagaggatttttgctttataaatatgtattcttttttctttcatttatttcctgcaagaggaaccgataaaatccggccctcctgcatggtcattcagccaaggacaaccggaagctctttgagcgacctaaaaccaatgagcttgcggtattcaaggcggtgtgcggccagccgaagcttaggcatccgctcaaacagtgtgagaattgcaatttgtgcttcgatgcgcgctaatgaggagcctatgcaaaaatgggcgttctttccgaatgcaagatgcggattcggttttctttggatgtccattttatgaggctgatcgaatatgcttggatcgcgattggctgcccctaaaaggatatatacctgctctcctttttttatggtcttcccatttatttcacagtcttctgaagcggtgcgtgccgtcagctgcgcggggctgtcgtagcgcagacattcctcgacagcagtttcaataagcgaggggttttctctcagtgcgctaagctgttcagggtgtttcaataaagtaaacacaccgttgctcatgaggtttaccgtcgtctcgtgtccggctatgacaagtaagatacatgtcgcgagcacttcgtcttttgaaagctgttcccccataataaacctgctgattaagtcttcctgaggatgtgctttccgctcgtgaatcaaatctctgaaatatgcagtcagcctgcctgcggtgtcgcttgctctgactaacatctttcttgaccgggtaagatcaatggcctgaatgacgtctgccgtccattgtctgaattgatatctctcctctttcggcactccgagtatctccgcaatgatgaggcttgccaatggaaaggcaaactctgaaacaaggtctgcgttttttttgttttggatttgatccaacaagtcatgaaccgtttcttttatacaggggcgaagtgattccgccgtctttgcggtaaattctttacctataagcatccgcatccgcttatggtctgattgatttttaaataacagcatatcgtgctggatatgagatagattttgatatttcgttgaagcttccggaaaagggacgcggtttttaaaccgggtgtctttcaaaatcgctgccgcttctttatacccggtgacataccagcccggatgttttaatacggttcctttataaacaggatcaatggcacgcagtttttcataaaacgggtaagggtcattccaaaaatccgaatccgcatggagggacggatgtgcagtcgataggcccgccgtcatcttatacctccgtattgcaggcggattgcaggccggctttcatttcttcaacggattcgacttcaaaccctaaatcatggagcatttgatgatcctctgtttcatgctgccctgctgtcgttaagtaatctccgacgaaaatcgaatttgcggcgtaaagtcccagcggctgcagcgaacgaaggttgacttcccggcctcctgagatacggatttcttttgtcggattgataaaacggaacaaggcgagcactttcaggcaatacaccggatgtaattcgcttaccccttctaacggagttccgtcaatcgcatgcagaaaattaaccgggatgctgtcggcgtcaagcgcttttaagctgttcgccatatcaatgacgtcctgtttcgtttctttcatgccgacgatgacacccgaacaaggcgacatccccgattgtttcgccgtttccactgtattgaccctgtcgtcatacgtgtgggaagtcgtaatgtttgagtgattcctttgtgatgtattgatgttatgattgtaccggtctactcctgcctgtttcaggcgctctgcctgttccggcttcagcagaccgaggcatgcgcagatttttaaaccgtaagtttctttaatttctttgacagcatcaacaacttgatctacttctctgtttgacggtccccgcccgctggcgacgatgcagtatgtccctatattcaagtcatgggcgcgttttgcccccttaagcaatatatgcttatccaccatccgataagactcgatcggcgcttttgatattgaagattgtgaacagtacccgcaattttccggacacaggcctgattttgcattcataatcatattcagctttactttttttccgtaaaatcgttttctgatatgaaaagcggcatgcatcagcaataaaagatcctcatcaggacaatttaaaatggccagcgcttcttgattcgttacttccgccccgtccagaactctctctgcaagatccatccattgattcatgtttatctccccatttgtgtcagattcatgaaagaggaaacatctatatgtttctcaatcatgtgttgaatgttttccggtgaaacgtgatccagcttcggtgtgattcccaaaatcggaactttgcataatgtttcaatcatgctcgggtttgtcttctcgtccagccccggccggctctttacgccgttgataataataccgagaacctctattcccatgtttttcgcatattcaacggttaaatatgtgtggttgatggttccgagatcaggcctggcgacaatcactgccggtaattccaaggcttttatcaaatcactgactaagtaattttcaccaagcggaacggaaatgccgcctgccccctcgacgatgaaacactcatgacgatttttgatcttactccagtgggccatgacttcatccatgctcacggatttcccctcaagcatggcggccgtgtacggcgcaagcggctctttccattcaaatggcgtgatttcttcatgagacagtgcggtttgtgacatgtttttcaacagcgaggtgtcactttccggatgagtccgcggcacgccgcttaaaaacggtttaaacactccgatatccgcctgtttctgcctgaatgccgcggcaagtccgcaagaaacgatggtttttccgacgccggtatctgttcctgtgacaaaaaaacttctcatttgtttatattcagctcttttctaatggaatcaaatgcttccgtcagctcgtctatgtcctgtaagctgcgatccgccgtaacggtcagcctgattctgctttcgccttccggaacggcgggcgggcggatggccggggcgcagattccctttttctcaagcagcgcagcggctgaaaccgctgtttttgcatcaccgatgataacggggataatcggtgtatctccgcctcttacagtaaagcccatatcggccagacgcgtttttatctttttgacagacgactgcagctcacggcgcgtatcgtgcatatctgatatgaggtcaaatgccgtatgcgaagccgcacaaattgacggcgggagggccgtctgaaaaataaacgtccgcgcctgattcagcaaaaaatcaataaaaatgtttgatcccgcggcaaaaccgccttccgttcctacagctttgcttaatgtgccgatgacaacatcaggacaaacaccgaaatagtcactggttcctccgccgttttccccgagtataccggttgcatgcgcgtcatctgctatcacaaatgcctggtactgctttgcaagcggcattattcggtcaagaggcgcgatggtgccgtccatgctgaaaacgccgtctgtgacgataaagcggcggttccgagtctggacggaggcaagttttttctcaagatcagccatatcaatatggcggtacacgatggtttccgcttttgataaacggcagccgtcaacaatgctcgcatggttcagttgatcgcttaaaatgacatcgcctttttgaggcagtgaggcaagcacgccgatattcgccaagtaaccgcttgaaaataataaagccgcttccgtctgtttaaagtcggagattttttgctcaagtttttcgtgccacacagtatttcctgtcgttaaccgtgagccgccgcttcccgctccgaaccggctcagcgctgtttgcgcggctgtgatcagccgttcatcttttgacagacctaaatagtcattggacgcccaggtctgccgcttttgccccttggttttaagagcggtttcctgtgttcgcagcgtccgatacagcccgtctcttttcaccgcatcgagccttccgaggagccatccgtcaaaatccacggccggtcacctcggctatcgcttctttcataatggagatcatggcttgtaattggtcggttgtgctggcgagcggcggaagaaaggcgatgacgtcaccgagcggccgtgtcagcatacccagctctctcattttcaaggacaccttgtatcccatccgcttttcaggcggataaggctgttttgtccccttatcctgcacaagctctatgccgcacatcaaaccgagctggcggacatcgccgacatgaggaagcagcttcagatcatgaagaaattccgcagccgtttttgatttttcggcgactcgttcaacgatgcgctctgattcgaataaacgcagattttcaattgccgcggcacagccaagctgatttcctgtataggaatggccgtggaaaaatgttttcattttgtcgtagtcatcgtagaaggcttcataaatggcttctgtggcaaacgtcacagcgatcggcaaatagcctcccgtaatgcctttccctgccgccatcaagtccggctggacgttttcatgctcacaggcaaacatttttccggtgcggccgaaccccgtcgccacttcgtcaacgatcattaacacatcatatgccgtacacagctttcgtacgcctgccagaaagccttcaggcatgacgatcatcccggatgcgccttgcaccatcgattcaatcgtaagtgcggcaatctcttcgtggtgctttgcaagcagctgttcgagcgcgtgaaggcattcatcccggcactgtacggggtcaccgctttcagatctgtatacataaggaatcggggctttgtagctttcaaacatcagcgggccgtacacatggtggaagagttcaatggagccgacgctgacggctccgattgtatcgccgtgatagccgttctgcatcgaaataaacgtctgcttcttaggtctccctacgtttttccagtattgaaaggccattttcagagcgatttccattgcttccgctccgctgtcggaataaaaaacgcgcgtcagcttttccggtgtgatgcccgtcagcatctcggcaagttctgttgcgggaacgttcgtcatacccagcaaagtcgaatgagcgattttttcaagctgtttttgaatcgcttcatccatttcttttttgcggtggccgtgtacattgagccatactgaagaaaagccgtcataatattcttttccgctgatgtctttcagcatgatcccgtttccgctttcaatgatgaacggatcttcatcgtaatctttcatttgtgtgaaaggcagccaaagatgctgtttgcttttttcaatcattgattgtttcatatgttctcctcccgctgaatgaatacaggctgcttctctaaaaaatggatacagctctccgtatctatggagccatcagtaaagaaaacccggcatccgctttcatctccggcattcttcatcttggcaatccgctgatatcccagcttctttgcagcaacgtaacctgttatgtaatcagggtcatctgaccagcacaattcggcaataattcccggatgtgcgcaaacttttgccgcgatggcatgtgcttcttttattcgtgaattttccggcatgttgtgagtaaaagcccatttttgaaaatcaggtgacggccaatccactcgggatacccgcacacctctattccctctgcagtcaatgcgttttcctgcccggatatcaaacaggaccgctcctcttgcttctgcatattccgaaatgttttcgtacgctttctcgatcatgtgcggaggaatccccgccttttgcagaagcttgcgggcgattgcttgtcctttttccggcgtgtctgtttgatggagggcaaccggcaaagggcggatcgtttcgatcggttcatgaacgctttcaagctgaatctgcataaaatcaggtatccctcttgagtgtgagaagcctttatgtaataagccatctaccgcttcctgtaaaccgctgtaagtgatgagccgttctccgccggaaatatgttttccgccctgctcatggggggcgtttcgggaagctctcattctgacgctgtaataggtctcttcctgcatgaaatttccctcctttcttttatttcgaaatttaatgttaaccaaaataataaaaggttaacactaatacagaatattagtgtcttgcacgtaatatgtcaacctaaaatataaaactgttaacttaatgggttttacaaagcctcattacgttttcatgttttgttcatattttagtaattgtttattcaacactgtccgctaaagtaatccatatcaacaaataggacagcgatccgcatcttacttatgaagggaggtcaaaaccggatgccgttatgctgaaagaaaaagtaaagacagcaggccgtttttgcaccgtgggcgccggcaatacgctgatcgattttggtgtcttctttcttctcaccgcttgccttgtcccctatctgccggcgcagatctgctcctattcggcagggatcatcaacagctatgtgtggaaccggaagtggacgtttcgtgtaaaacacaaggctgacgggaaagagatcgtgcgctttctcatcattaatcttgcagcgtcgggaatcacctttttgctgctgtacgcgtttcaaaaaggcggctgttcgcttttggtgagtaagctcgccgccactatcggcggaatgatgatgaattttatcggaaaccgaatctgggtatttggagattcgctgaaaaacatacaggatcaggagtgaagatgaatgagaaaaaaagtgagaaaagcggtcatccccgcagcgggtttaggaacgagatttctgccggcgacaaaggcgcagccgaaagaaatgctgccgatcgtcgacaaaccggccatccagtacattgtcgaagaagcaagagagtcaggaattgaagatatactgattattacagggagaaacaaacgctcgattgaagatcattttgaccggtcggcggagttggaaatcaatcttaaggaaaaaggcaagtcagagacactgaaggaaatgcagcggattgccgatttggccaatattcattacatccgtcagaaagaaccgctcggactaggccatgcggtgctgtgtgcggagcattttatcggagatgagccttttgccgttctattaggtgatgatattatggtatctgacactcccgctctttcacagctcatagacgtctataaccaacacggcacagaaacgatcggcgtacagcccgtcgatcctgctgatgtcagcaaatatggtattatacagacggggcggcagagcggtcatgtgtaccgggttgaggatctgattgagaaaccggccgttgaaaaggcgccctctcatattgccgtgttgggccgttacatattaacccctgccatttttaaagcgctgaagacgatcggaagaggcgcgggcagcgaaatccaattgacagacgcgctgcgcgaagtatgccgcacccgaagcatttacgcgcgggagcttgaaggaagccggtttgatataggagataagttcggctgttttaaggccggcacggagatcgggcttctgcgggaagaaatgagaccgaaacttttagcttatttagaagaggtgttaaaaagagaatctgaagaaatcgtgcgttaaaaaataatttgtaaccattttgcttgtcaatcagtcatataattgggtaaaaagataaagaggttgtgaacagtgtgggcaattttattagtgaaatattatcctggctgacaagtatgggctatttagggattgcgctcggattaatgatcgaaatcattccgagtgaaatcgttctggcttacggaggctatatggtgtcagaaggcacgatcagctttatcggcgccattgtcgccggtgtgatcgggggaacgatcgcgcagtgctttatatactggatcgcccgttatgggggacggccgtttttggacaagtacggcaagtacttacttctgaaaaagcatcatgttgatgttgcggaaaactggtttcgccgttacggcgccggcgttgtgttctcggcgcggtttatcccggtcgtcagacatgcgatttccatcccggccggccttgcgaaaatgcctctttccaagtttgtcatattgacgacgcttgccattattccgtggtctgtcattttcgtttatctcgggtatcagctcggggacagtggaaagacgtagacagctatgccggaatgtatacaactccgatcattatattggctctcgtatttattgttgtttattttgttgtgaagaaaatgagatcaagactgtgaaaaaagactgcataagaacggctgcgagccggatctatgcagtctttttttatttataccgggtatacggggtgtttccggtgtgtgaatgtcagttgtttggacatgtaagcagtgaggcgtttattgagttcttcccgcaaggaatcagcaggaacaatgccgtcaatcaccatttcagaggcaagccggtaaaggttaatgtcttccttatattcatcacgcttttcttgaataaaagccggcctttcttcaggggccagctcgctgattttgtttgcgtagaccgcattcaccgctgcttcaggacccattacggcaatttgcgcagtcggaagcgctaaacagcagtccggttcaaaagcaggccccgccatcgcgtataatccggcaccgtaggcttttctgacgataacggaaagcttcggaacagtcgcttccgccattgcggagatcatttttgcgccatgcctgatgatgcccgcctgctccaccttcgttccgatcatgaatccgggaatgtctgctaaaaacagaagcggaatatggaatgcgtcgcacaaagcgataaattttgcggctttatccgccgaatcgagaaataaaactccgcctttgacacgcggctgattggcgataatgccgaccggctgtccgtgaatccgcgcgagccccgttattaattcctgcgcaaataacggtttaatctcaaaaaacgagtcttcatcaatgacacgttcaattaaatccatcatgttgaacggtgcgttttgatgtgccgggatgacatctgagagcggtttttcaaaagctttcgggttcttagatttgttgacgggcgctttttcagtataatttgccggaaagtagctgagatatgtctgcgccatcatgattgcttcctgttccgtcggggcgaggagatcaccgcagcctgatacagaacaatgcatacgggcgccgcccatttcttcaagcgatactttctcgccgatcaccatttctgccatgcgcggggaacctaagtacatggatgcattgccttcgaccataatgacaatgtcgcaaaaggccggaatgtaagcgccgcccgcagcggaaggaccgaacaataaacagatttgcggaatgcggcccgacagctttacttgattataaaagatgcggccggctccccttctgcccgggaacatgtcgacctgatccgtaattctcgcacctgcggaatcgactaagtacaagagcggacactgaagcttctccgccgtctcctgaatgcggatgattttttccaccgttttcgcgccccacgagcccgcctttacggttgagtcgtttgccatcacacaaacggttctgccgccgatggttccgatcccggtaacgaccccgtcagccggcagtccgtctgacatgcactcggcgaaaaaagcgtcttcaacggatatgccgtcatcgaataaaagcttcagcctgtctcttacaaaaagttttcccttcttttcgttgcttgcatgatatttcgcggctcctcccttttcaatcgttttgctgcgtgtctgccgttctttttcgtaatccatccgagtccctccatgttttattttcctttgtattcagggggtcttttttctttaaaagcgcgcaggccctcttctctgtcaagtgtagggatgacttgttcatatgcttttcgttcgatttcgagccctgtattgagatctgtctccagacccttgtttatcgcggattttgcttgtctgacggcgatcggcccattagcggcgatgcggccggccagtgcttttgctttttccataagttcatcggcttcacaaacatgctcgatcagcttcatgtcttttccctcttcggcagaaagccttcggccggtatagatcaattcttttgccgcgccggggccgataagccggggcagtctctgcgttccgcccgccccgggaatgattgcaagccctgtttcaggaaggccgaggcccgcccggctgacggctgttctgatatcgcaggcgagagcgagttcaaggcctcctccgacagcggttccgttcagcgctgcaatgaccggctgcgggagagcttcaatggatgcagccgtttcaccgatacgcctgacgctttgcttaacttgttcatgattcatcccagctctttcttttaaatcagcgccggcgcaaaatgtgtttccggagccggtgagaataacacagcgaatggatggcgagtttttgatgtcttcaatcacacgctgtaaatgatcaatcatttctgaagacagcgagttggccgcatgcgggcggttcagcgtgatcagaccgatcgtttcttgacagacggaatacaagacgcaatctcccatggcttctcctttctcatttcgttctgaatgcctgcagatttctgcttggcagatctttgcctattttatccgcgatccagcgggcggcatcaagaagtttattcatgtccgtcccggtatcaatccccatttgttcgagcatataaatgacgtcttctgtggcagcgttgcctgctgatccaggggcgtacgggcagccgccaagcccgcctgaggaagtatcgaaggatgtaatccccatatcaagagcgggaatgatattcgctagagccgttcctcttgtatcatggaaatggagtgcgatttttgaggcgggaattctcggcaaaagggcttcaagcacggatatgacctgcaaggggtttgccgcgccgatcgtgtcgccgagcgatatttcatcaacacccatttcgagcagtgtgtctgacaggcggatgacttgttcgaccggcacgttctgttcgtacggacagccgaacacagtggacagataagctctcgtcgccattttttcagcttttgcttcagtaataacccgcctgagctcttgaacggtccggtcaatcggtttgtttacgtttttttggttatgggtttcgcttgcagataaaaatacacaggcctgatcgattccgccttctgccgcatgctccagtccgatgaggttcggaacgagcgccgcgtagaccgtatgttcagacctggcaatgccttttgcgacgtccaggctgtcacgaagagccggaatccatctcggatgcacgaatgatgtcacttcgatatagggaaggcctgtttttgacagcatattgatccactcaatcttatcttctgtatccacccacgccgattcattctgcaagccgtcacgcggtcctacttcattgatgcggacatattccggacagttcatgctgcacctcccgttttattgaagttcaatcaggacctctccttcatcagtgaaatcaccttctgattttttcacttctttcaccgtacccgctgcatcagcgataatcggaatttccattttcatagattccaagatggccacttcctgtccttcttcaatgacatcaccgggcttcacatgaattttccacaggtttcccgccatctgaatttttatgacgctcattttgacgccccctcgttcattgtttgtaaaaaaccggttgttgcctcacccttttcaaacacttctgaatgtgcaatttttgtaagcagcggaatgttggttttaatcccttctacatgatattcgccaagggcggttttcagttgttcaatggcttgttttctcgtattcgccgtgacgatcattttggcaatcatcggatcgtaaaacggagaaatgacgcttcccttttcgacggcgcattcgtgtcgcactgacgggtgtcttaaaacggaaaaagacgagatggtaccgggtgacgggtaaaaggtgaccggatcttccgcatagatccgcacttctatcgcatgaccgcggtggttgatatctttctgcgagaaagtcagcgcctgcccggcggcgattttcagctgttcttccacaagatccagtcctgtaatttcttctgtcaccggatgctccacctgcagtcttgtgttcatctctaaaaaatagatttgtttcttttggtcgacgagaaattctattgtgcctgcattttggtagccgatcgatttagcggctttaacggcggtttcaccgagtctttgtcttaattcatcgtcaacaaacggcgacggcgcttcttctatcactttttggtggcgcctttgtactgaacagtcacgttcaaacagatgaacggtgttgccgaaagaatctgcgagaatctgaatttcaatatgacgggcattttcaatgaccttttccatatacattgcgccgtctccaaaaaaggacgcggcccgcttttgattgccttcgaacgctttggccagctcttcttctgaatgtacgatctgcatgccgattccgcctccccctgcagacgctttcagcataaccggaaagccgatggcacgggcttcggctaaggcggagtgaacatcgggcaatggctctgaaacaccgggaacgatcgggacctttgctttttgcatcgtttttcgggcttctatcttgctgcccatcttggcgatgatatcaccgggcgggccgataaatgtgatttgttccttccggcagcgttcggcgaacaggctgttttctgacagcagcccgtagcccggatgaatggcgtccgctccggcggatttggcggcttctatgattctgtcgatatgtaaatagctttcatttactctcgatttaccgatcggataggcctcatcagccgcttttacatgcagcgcgtccctgtcggcttctgaatacacagctgccgaggggatgccgagacgtttgcaggtgcggataattcttaaggcgatttctcctctgttggcaatcaggacttttttaaacaaatgtgaagcactcctttttcattaagttaacttgagctcttcaatcgttttttcccgcagcttgaatttctgaatttttcctgaggctgtcattggatattcatctgtaaacaaaacatacctggggactttatagcgggcgatatgttctttgcaaaaggttctgatgtcttctgcggaagcggtttgtccgtctttgagcctgacccacgccgcggcctcttctccgtatttcggatcaggcacgccgacgacctgaacgtctgccactgcgggatgccgatataacatttcctcaatctcgcgcggatagatattttcgccgcccctgatcagcatgtctttcagacggcccgtgattttgcagtacccgtcctcgtccatgacagccaaatcaccggtatgcagccagccgtccttgtctatcgcttcttcggtcgcttcttgatttttatagtaacctttcatgacatgatatccgcgggtgcagagctctccttgttcgccccggtcggcttcttgggatgttccgggccgaacgattctgacttcgatatggggaagcgcgcgccccgctgtttccactcttctttcaaatgaatcatccgttcttgtctgcgtaatgacaggtgatgcttcggtctgtccgtaggcaatggtaatgccggtcatccccattttgccgatcacttctctcatgacttccgccgggcatggcgagcctgccataatcccggttcggacgtgggaaagatcatattcagaaaagcggctgtcatttaggagggcgataaacatcgtcggtacaccgtgcagagccgtgcaggcttcttgctccaccgttttcagaacggccggtggagaaaactgttcgatcggaatcatcgccgcacccgcggaaacacatgccagcacgccaagcacacacccgaagcagtggaaaaacggcacgggaatacataaacggtcacttgaagtaagcttcatgcattctgcgatattggccgcgttatttacgatattaaaatgtgagagcatgacgcctttcggaaatccggtcgtacctgatgtatattgcatatgaatgcaatcatcctttttcaggctgtccatccttccgtcaagcgctgcatccgttacagcttcgccttccttcagcaaagaatcccagcggtgcatcccgggcggacttttatcaccgatatataacaccgtccgtaaaaaggggtaacgtttcgaacgcagcctgccgtgctcacaagttttcagctccggaatcagcttattcaccatctcaacataagatgtctgccggtaggaatccatgattatcagggccgagacgtctgaatgcgccagcaggtaatcgagttctgcgatttgaaaatttgtattaatggtgaccagaacagcgccgattttcgccgttgcaaattgcgccgcgagccattccggtatgttggatgcccatatggccacatgatctcctttttcaattcccagtttcatcagcccttttgcggtttgccggcataaccggtcaaactcggcatacgtataacgaaggccgcgctcagggtaaacaaccgcttcatgatccggaaaaagctccgcggtccgctcaagcagctttccggctgttaaatggataagttcagccatatgacctgcccccttccatccctgtcttagtaaacgttttcatttcacttcaaaagctgtcttgcgatgaccattctttgaatttctgatgttccttctccaatctccatcagctttgcgtcacgaagcatacgttcgacaccgcattccttcatataaccggaaccgccatgaatttggatggcctgaaggcaggttctgacggccatttctgaagcataaagcttggcgaatgccgcttctttcgtaaatggcaggttttgatccttcagccatgccgctttaagcaccatttgtctggcaaggtcaatttccatcgccatatcggccagcttaaattgaatggcttgaaatgacgatatcggactgccgaactgcttgcgttccttcgcatatgacagcgacgcctccagtgcgccttgagcgataccgacagccagtgccgcaatcgagatccgcccgccgtctaatgtatataaaaattgtttaaaacctttttcaggatcaccgagcaggttatcggcaggcaccctgacatcctccagcacaagctcggccgtatccgatcctctcacacccatcttgtcgtacggatttgtgatcgtaaatcccggtgtgtctgtcgggacgatgagagctgaaatgatcggttttccggcggagttctttcccgtaacggcggtgacaatgaccgtgcgggcgtaatttgcgtttgtgatccagcatttttctccgtttatcacatagtcatcgccctttttctcggcttttgtctgggtgccgccggcatctgaaccggcattcggctctgtcagcccgaatgatccgagcgcttttcccgaagcaagcggaacaagatgttcttgcttttgctgttcagtaccgaaatagtataatgggcttgcgccgagtgacacggctgccgcgtagctcagccccgtgctgccgcaggcttttccgatttcttcgaccgctgctgcatatgaaatggtgtcaccgcccgccccgccgtattcttccggaaacggaattccgagcagcccgagttcgcctatttttttaaatgtgtctatcgggaagacggctgattgatcaacctcatgggctttcggggcaatttcatttttggcgaaatctctgaccatttcgcgcaccatctgctgttcttttgtcagttgaaaattcattaaccttcctccttctgctgctttctacattttattaatgggggtctttattcattccatccaaataaagtctgaacattcggactcatccgccgcaaaaaaaaactgacagtgccgcaactgtcagttttattaataatggctatttaatcgtccgttttgcggagggacggctctcatggtgaagcctgtcaacggaagtaacgatataggtgcatgcttcttccgcccgaataacagtatctgaaaatgtctgcgtccgtgacgatgtttttctgactgtatccactaaataaggctgctttcccttttctgcgcggtaaatggcgtaataagccgtttttttaccgttggatttcgcatcttcgatatagagtgtatggcctgaagcgttcttctccgcccgtttgacagccggtttttttaaagcggaatgtccgagccaaggcatctcgggaattaatgcgggccggctgtacatgtcattgatcaaacggtttttcacatcgagcggattacggtttaaatcctttaaactgaaatgcatgctgccttttatccatgctgatcctctgtttagcgtaatctgtcttccgtattcccccgggtcggcccaggccggatcagtattgttgttgattttataagctgcctgcccgatatataaatgcaccggccgattgttcacttcttttccccaccaatccgctaagacgtcatatgccgccgctttaaatccgatactccagtaaatttgcggtgcgatgtaatcaatgtatcctttttggatccattctcttgtatcagcatataagtcatcgtagttccgcaccccggcggccgtttcggagcctgtcggatcatctgcggcatttctccatacgccgaacgggctgattccgaatttgacataaggtttttctcgtttgatggtttcgttgatttcttttacaagccggttgacgttatccctgcgccagtcatcaatcgatgcaaagtgagcttttccgtaccgttcgtattccgcctgatcggggaattcctgtccggcaattttataaggataaaaataatcatccatatgaaccgcatcaatgtcataacggctgaccacttctttgattccatccgttataaattgtcttacttccggaatgcccggattatagtacagctgttttccgtatgcagcgacccagtccggatgggaacgcgcgggatgatcatctgaaagcgcattcaaatttgtgtgattcatcgtgatccggtaaggattgaaccaagcgtgaaattcaagattccgtttatgtgtctcttcaactaaaaaagcaagcggatcgtagccgggatttttgccttgggttcctgtcagatactctgaccaaggcccgtaatctgatggataaaaagcatcagccgcaggcttaatttggacgataacggcgttcattcccatcttctgaacgtcatccagcagcttgctgtattctcttttttgctcttccggtgacagcccttttttagagggccagtcgatattggtgacagacgcgatccatacggctcgcatttctctctccggctgagtgccgcttgcttgtgcggatgctgagaacgtaaagatgccggctgtcagtacaacggccaaaaaccatatcatgctaaaacggcagcttttcatgtttttccccctctctgctttacggtattccgaagcattccgggcggtgaatcagaaagcctgctttgctcctctcagcctaaaagggaaagaaaaaagtcctaaagcgaatcaaaacgcttcaggactttttatgttttatggcggcgagcacgtcaatgaccttcgttccgacgccgacgcatgtttcaagaatggcctgcgctccggcaatggacaaaatgaaaataaccggatgtgcatagcggggccagaccaaatagcagatgccgatcaatatggcgcaccagacgcccgcacaccaataacattgcagcatataaccgaatgcggaggaagggacttttttttggacggcgcgcccgttttgatcgacggttttttcttgctttataaagggttttcttatgaattccgtaatcttatcaaatacgatcaaatgggtcagccggtagctggcaagaataatcattacatacgtaagccaagataggttcgtcatctcaaagcctccaaaaaaactgagtgtgattcccctatcttgccctttgtcttcttcagtcattctgccggatgttacagattccgcgccaagcgtcttccgctgtttgcgatgatgtccagtatgacctcggcatttttgtgtgcaaactcgggctcaaacatatctttatgggctccctcgccctgatattcctggtagactcccgttgtggcgccttcccatttcatcggctcggtcttatcactgtgctcttcctttatgccggcctcaataaaatggagatttgccgcaatttggccgtcatttatcagttccgcccagtacgtttgatagcgctctgtttttctgatgaccgcttccctgacggcttccgggacattttcggctgttgcgtttgttggctgcggcggcagtgcgtcaagctttctgtacgcgtctgcgataatgacgtcgctgatttctaagccgcgcttttccatcgcttttgcagcctcgaatgccgtattgccgcccgctgaatatccgaagaggatataagggccttccggctggatttccagcattttatcaatgtattgttccattctgctgtcttcttcaataaagttaaaaccgtacacagcagcccgtccatttaatgccgccgccagatctttaaagaaaatgccgaaacctgagataggcggaaaacagaaaagattgcggcctttcggctgattcagtctgctgatatgctgttcggcagcttctgacagtgtgtttgaatacagcttttcagccaattgttcaattgtcggatattcaaatatcatttcaatcgggacgtccatctgctgcctggtcttcagctgatgaatcacttgcaatgctttcaaagaatggccgcccagctcaaagaagtcatcctgtatgcccagctccccgcagccgaggatcggcgtccaaatgtcgatcagctcacgctctacccagtttcgtggcggaacggcttttgatgaagcttttttccgttccggcgcaggcagcccgcggcggtccactttgccgtttgcggtaagcggcatacggtcaagcttcatcacatactgcggaatcatatagtcgggaagcgacctggccaatagggatcgaatggctctttcttcagcatgtgcgcctgtataatacgcacaaagggttgcttcttgtccttcgtctgacacgatgactgccgcttccctgattccatcaatttcagtcagccgcgcttcgatttcggccggctcgatacgcttcccgcgaatcttgaattgacggtcgatacggctgatgtatccgatgcttccatcaggcagccagtgtgccaaatcccctgttctgtagatcttttcttcaggatgaaccgggtggctgacaaatgcttcacttgttaagtcaggcctgtttaaatagcctttggcaaccccgtccccgccgacacaaagctcaccaggcacgccgatcggcgcaagtccgccatttttatcaatgatatacgcggttgaattgctgatcggttttccgattgggatcggctgagaaaaatcgtgcctgatttcgtaaaaggtagaaaatgtcgtattttccgtcggtccgtatatgttataaaggctgagattcggacagcggtgtctgaccttattgatgagcgccggggacaatgcttctccgccgacatataaggtgtgcaatccgcaaaacatctccggatccgcctgggcaaactggttaaaaagcgccgtcgtcaaaaacagaatcgtaataccgttggaagaaagataattgccgaacctctcaggggcaagcattgtcgtgcggtcaaccacatggaggcacgctccgttcaatagcgctccgaagatttcaaacgtcactgcgtcaaaaccgatggatcctgtcagaatgagacggtccgtcgtgccggctgacgtgtaattgctgtttgacacgagcgatacgacgttgcggttggaaatcatcacacccttcggttttcctgttgaaccggatgtatacataatataggcaaggtcatcaggtgacgtaacggtattcagttttccctcatcagctgtttgtttttcagctgcagccgggatagagatgatgtgagaaaagtcaatgtcagtctcaatccctttttgtaccgttaacagctgtgctccgctctcagtgagcatttcggcgatcctgtcggatggcagttctgcatcgagcggaaggtacgtccctcccgctttcaatacagcgagaacagcgatgataaattccggtgagcgttcggcaagaatcccggcaattccttttggcgccaaaccgttttccagcaggatgcgggcgaacgcagttgaccgttcatcgagctcccggtacgtcatcgtcagcccgccggcgtgaagcgcctgatggtccggggttttcttcacctgtcggctgaacaggctgatgatgctttcgtctctttcatacgttgttttcgtgtcattaaattcgccgattattcttgatttttccttttgtccgagcatcggaagccgatcagcgggaacatcgggattgaaggcggcgccgcgcagcgcttcttccaagtgtccttttacgctctctatccatacttcgtcataaacgttcgcattgtagctgaatttgatgatcagctcatcgccgggcgctatgatgaggttaaaatcgtagcccgattgttccgaaacattgacattcccgatccggaacggtgcatccgattccttttccgcgtctctcatctgctgctgaatcggataattttcaaacacgatgatatggtcgattaaatcctgtttcagctcagtctgagattggatgtcagcaagcggatgataactgaacgcctctgaatcaagcatttctttctggcagcggcccagcagttctctaaagctttcgtcacccgttttaatgcgtaccggcacagtattgataaacagcccgatcatgctttccacgccgtcaatgacggaaggccgccctgatacgacggcgccgaatacggcatcgtccgtccggttgtagcgctgcagcatcaggccccatacagtctgcataagaaccgcgagcgtagcgccctcttctttggcgatggttttcagcctgtctgtcagattttgatctaaagaaaacaggagctctttcttacggtagccttttccctggggacgggccgatattttcgggagtcctgagggtgtctcgcagcttgctaaatatcctttccaatactcagaagccgcgtctttgtcctgatcagtcagccatgtaatatacgtgctgtaaggctttgcgggcgccagtgtgacgggtgagcctgattcaatcgcccggtacatatgcatgaattcctgaaggacgatgccgaggcaccagccgtccataaggatgtgatggtggctccagacgcatacatatttttcctcagccgttttaaacaaagacacacgcatcagcatatccttttgcaagtcaaagccttttaagcggtcacgttccttaaatcgctgtaagtaggcgctctgttccgcttcatccaaatgtgtaagatcttcgcggtgcagccggaattcccgctcacgcagcacgacttggcgggggccgttcagctgagcgacatgaggtaaaaaaaccgttctgaaaatatcgtgacggctgatgacagactgtacgctttgctcaaacaattccggacgaagccggccttttatggtgaagacggattgctcgatatatgcagccccctccttttgcagaaaggaatgaaaaagcattccttcctgcattcggctgaggggataaatattttggatgttttttgttttgtccatgtgttcctcccgctcggtttagtggaagctgagtaagtcggcaatatcctgcaaggcttcctcagtcagctcccgatcatcaaagtcactgacggtcttctccgtatcggttttgctgaggcagtgttccgacagtttcaggagataataccggcagctttcggacagccgttcgatcgtatcttgccggaagcgctccgtttcataggaaatgctgacggtcatccggccttttgccgcaatagcgctgatttcaagtgactgctcccgtttccatgtatctgtgacatcatctccgcctcccaaaggagaaaactgaaacgcgtcaggctgttccgtttctgccggactcccgccgggcgcatcgaattgtccgagataattaaagctgatctccggtgctttcccgaaagtcatcccggcaagcttcggcggtgttaaatatttgaggacgccgtatccgttccctttatccggaatgcgccgcaatgtgtctttaacggttttcaatgtgcgaatttcatattcttcaagaggttcataaactccgctccggacaagcaccgggtaaatggaagtgaaccaccccactgtcctgctgatgtccgcacctgcctgctccgattggcgtccgtgtccttcaagggcgattttcaaagcgtgctgcggcgaccacttttgaagggcaagcacggcggaagccaacagcacatcttgcgtatccgtattgtaggcgctgtgcacatctttcaacagggcgtccgtttcactttctgtcagagtgaaggataccgtgttccgtttttttgcaggagtttgagatagatctgcctgctcgtaaggaagactttctgtttcatagtgttcaatctcccgccaatactccgcctgctgaagaagctgtttgctttcggcataatcggccagctgctccgtatatgttttgaatgacatggttttcggagggagtttgatttcctgtccagaggcggcctgctcataagcagaagccaagtcctccaataaaatccgccatgatatcccgtcgacagcgagatgatggaccgtcagaaacaagtaatcttctgcttcagagcggaacagtcccgcctgtaccagcggcccgttctccaaatccatgtttctctgaagctctgcgacgcggcgttttataaaacgttccttctcatgctcatcgccttccgtttctaatatggtcaggttgtaaagctgctcatctgcgaggtcagccggtctgttgaagaggagaagacctttctcttcgtcttttttgcagacaaggcgcaaagcatcatgatgaacggtaatggcttttaacgttttcctgagagcctcttcatctattgaatttgttctcgtcagcatgacggactggttaaaatgatttgcttccttcatgtcttgtgtgaagaaccatttgtgaaccggcgaccacttcacttctccttctgcaggagcttggctgaccggctgccgctctgtacggacataaggcgccagctctctaattgtcggccggctgaaaatatcttttacggcgatctgttttcctgcctgatgtaatcgggctgatacttgcagggctttgatggaatcgccgcccagttcaaaaaatgattgatccgcggcaatgttttcagttccgagcacttcgctccaaatcgcggaaagctctttttccatgtcgctttcaggctccgtaaatgcccgtccggtgtgcgcttttttccgcggctcaggaagcgcgcggcggtcaagcttcccgttcggtgtgacaggcagggcttcaagtgtttcaaagaacgccggcaccatataagcgggcatttcatttctgagcgcctgctgcacggtttcactttctgttccttcttctgtcacgatataagcgcatagttccgtttggcctgctgatgcggtatgagcggtgacggctgcttctttgacaccttttatgcctgttaaggccgattcaatttctttcagttccacccggtagcctctgattttgacttgctcgtccattcggccgatatattgcagcgtgccgtccggcagccattttgccagatcgcctgtgcggtacatgcgccggttcttctggaacgggtcttggacaaaggcttgggccgtttgcttaggaagattgcggtaccctcttgcaaggccggaacccgaaatgcaaagttctcccgttacaccgatcggctgcgggtgatccccgtttaaaatataaacgtgtgaatgctcaatcgtccggccgatcgtaatgttctcactttgttctatatgtcttgccgctgtagtggcgacgctgttttccgtcgggccgtactcattggcaagctccgtgtgaggacaaactgataaactgcggctgataatgttttggtcgacagcttctccagctaatgtgacaattctgagagactctgcatcccccggctccagtacgtcaagcagtgtacggtacagtacgggaacaatgatcatatgagtgatgcggtaagatgcaagatagtgtttaatggcaagaatatctcttgcttcatcttcggctaaaacggccgctttcgcaccggaaatcagcggtgtgaacatacttgttacaaaaccgtcaaatgaaaatgaaaaaagctgaagaaccgtatctttctcattcagatcataaaatccgcttcgccattgaagggtttggctgacggaacgatgttcgaccataacccctttcggcctgcctgtcgtcccggacgtgtaaatgatgtaagccaaatcttccggtgctgataatggctgaaccggtgatgcgtcttgttcttggatatcctccagtgcgagcacttcacctttaaaatgatcaggcacttgatctattgcgccgtgtacggtaaggagaagcgctgtgccgctgtctgaaatgatatattgcttgcgttcctccgggtattcaggatctatcggaacgtaggcgcccccggctttccaaaccccgaagactgcggcgacttgttccggtgatcttggtatcacaatgccgacggcggcattcggtccgatctgccgtttttgcagagctctggcgattttattcgaccattcatctaattctttatatgtgaccaacgtttccccgctgataagggctgccgcatccggtgtttttcgcgcctgagtgatgaacagttcatgaactgttttttcaggcagctgtttatccgtcatgccgttaaagtccgaaagaattcggtcccgttccgcagcagtcagcatgctgatcgcttgtatagaagtttccggttcacggacaatgtgttcaagcatcgtcataaagtgggaagcccagcgctgcatcgtttctttccggaataaagacgccgcatattcaaacagaaaatgaatctgtcccccgccttcagaagcctgcaaagtgacatcaaatttggaaaccggacgggacacgtccgcaggctgaatatgcaaaccgtccaacagcaattcctcatgttccatattctgaacgacaagcatggcatcaaatagcggattacggctcatgtcccgctgcacgccgagccgttccacaagctcttcaaacgggtagtcctgatgctcatacgcctcaagcgccgcctggcggacttccgccaaataatcggtaaaccgtttgtctcctttcggctccgttctgatggcaagcgtgttgacgaacatgccgagaatcggttcaaggtctttgtgcgggcgcccggcaatcggcgatccgacgatgatgtcttcctgcccgctcaatctcgcgagtaacgtattgtacgcggcgagaagcaccatatacaaagtggagccgtgatcccgggcgatgcggtgaaggccggatgccgtttcagcgtcaagcgtgcacgatactttcccgcccgcaaagcttctgaccgccggacggggcttgtcagccggaagctcaagcaccggaagctctccttcaagtcgcttcagccaataggcttcctgcttctggtacccttctttctcctgaaacgaccgctgccagacggcatagtctttatattgaaggcgcatcggcgcaagcgaacggcctgcgtacagctcgccgaattctttaatcaaggtgttgacggacacaccgtcagaaattatatgatgcatatccgttaataaaagatggcgttcatccgattctttcacgagagccgcacggaagagcggcgcttcttccagacaaaacggccggacgaatgcgtcagctgactcggcctcatcgagctgaaacggtacgctgtcatggatgcgctgcaccggttcgccgtcaggccccgtttcaaaggacgttctgagcgactcgtgccgctccacaagctcccggaacgtctcctccagccggacacggtcaagcgtgcccgtcagttccagcacagccggcatattgtagccgacaccgccgtcttcaagctgttggagcacatacatccgtttctgcgctgaagacaccgggtaggtgtcctgttttttcgcaggctgaatcgcttcatacgggctctcttccaagtcctgaataaccgaagcgagctcttccaccgtcggccgggcgaagatgtcctgtaacggcacctgaacaccgaactctttggcgatgcgggagacgagagccgtcgcttttaacgaatggccgccccgctcaaaaaagtgatcccggatgccgacggggccgtttttcagcacctcttcccaaagggcgcaaagcttcatttccgtgacgttccgcggggcggtgtacgcctgtctgtctgccgctccgccgggagccggcagcgcgcggcggtcaagctttccgctcggcgtgaccggccattcgctcatctctataaactgagccggcatcatgtaggccggaaggcgtgccgcaagctctgcccgcacgtcatcgctttttcgtccttcgatataggcgtaaagcgcggtttcgccgtgttcggtccgggcggtgaccgccgcctcacgaatgccgtcgatgcgccggatcgccgcttcgatttcccccggttcaatccggtagccgcggactttcacctgtccgtctgaacgcccgagccattcgacaaggccgtcttctgtccagcgtgcgatatcgcccgtctgatacatgcgttctcccggataaaacggatcaacgacaaagcgctcctccgtcagctcagggcggttcagatagccccgggccacgccggtccctgcgatatacagctctccgatacagcccggcggcagaagctgtttcttttgatttaaaatatacagccgcatgttatgtccggaactgccgatcggaacattgtgaaattcctttccttgcggcaaatcgaagtacgccgcttctaccgtcgcttccgtcggaccgtaggaatttgtcaattccgttcccggcagaaggtcataaaaacgggaaaccaagtgcgggcccaattgttcgcccccggcaaaaaccctttttaagcaggtctttttgatcggctgttttctggaatttatatattccaagaaagcatgaagcatggatggcacaaaatgagctgccgtgatgcggtttttctccaatgcgttcagtatcatttcagggtctttctcgccgccttgcggaaggagaaaaacagaagctcccgcgatcggccaccaaaacagctcccaaatcgaagcatcgaaagagtatgatgttttatgcaaaatggtgtcggaatcctttaatccataacgcgcttgcagcgagtataaaaagtttacggctgactgatgttcaacctgcacgccttttgggcgtcccgtagaaccggatgtatagatgatataagccaatgaatcaggctttaccggaacattggggttggccgcagcttccgggtttcctgtttgtccgcttttcagagagatcgtttctcccttaaaaagatctggtgcgaaaagttctggttctgccagtaagaatttcacgccgctgtctttcagtaaaaagcgaatccgctcttccgggtaatccggatcaatcggcagatatgcaccgcctgcttttaagacagcgtaaatgccgatcagcatgtcaggagaacgccggcccataatggcagttttatcctccagccttatcccccgtttgatcagccggtgcgcaagctcattcgctctttcgttcagttcctgatacgtaatcgaaatctcatcagttaaaatcgccggacggtccggcgttttttccgcctgttgttccagcagctcatgaaggggctgatgaagcggaaacgctgttttctgcaaggggctgaaattttgaagcagagacacttcttctttttctgacaaaacagaaatatcgtctaattccaaacccggatcagctgcggcgttttcagcaagtgtcgtgaaaaattccgcccatttttgaatcgtttttctctcaaacaaatcagtgctgtattcaaactggcagtacaattcaccggcgttttcggagatgtacagcgataagtcaaatttagaaatcggcaggctgacgtctgccggctgcagttcaagtccggctgccctaagcttctgctgttccatattttgcagcgcaaatgttgtgtcaaacagcggatttcgggacatgtcccgcggcacaccgagcttatcgacgagctcttctaacgggtaatcctgatgctcgtaagcctcaagcgctgtttggcgaatttcctttaaatattctttgaacgtcatgcttccgtcgggacgcgtcctgaaagcgagcgtattgacaaacatgcccagaacggcgtcaaggtcggcatgaggccttcctgcaatcggagacccgacaatcatatcttcctgtccgcttaaacgggctaacagaaccgtgtacacaccgagcagcgtcatataaagtgtgcatttgttttctttcgccagctttttcaactgcgctgtatgtttttcgctgatgacaaatgacacccggtcaccggaaaagctccgcaccgggggacgcggcttatcagccggcaattcaagcacgggaatctccccggcaagccggttcagccagtactcctcttgtttccgatatgcggcgcccgccttaaatgattgctgccagacggcataatctttgtattgaatccgtaacggcggcagacttctctcagcatacagctcactgaattcacgtatcaaaagattgacggatacgccgtctgaaataatatgatgcatgtcagctaaaagcagatgccggtctttttctatttggacaaatcccgcccggaaaagaggcgctttgccgagatcgaacggccggataaacgcttcggctgattgttcttttgtaaatgcaaacggcacttcgtcatgaatcctctgcacaggccggccgtttttttcttcaaaggacgttctgagcggttcatgccgccggatcagctccttgaacacggcttccatcctgtctcggtcaaacggccccttcacctctaaaacggctggaatgttatagctgacaccgccattttcaagctggtgaaggacatacatccgtttttgagcggatgagacaggataagttccttttgcttctgtcttttctatggatgcgaacggattctcttctgcttcaccgatgattttggcgagttcttctacagtcggatagctgaagacatcactcagcgggatttgcacgctgcactctttagctatttttgcaacgagtgccgtcgcctttaatgaatggccgccaagctcgaaaaagtgatcgtgaacgccgatcgggccggtttgaagcacttcttcccatatgcgggtaagcttcagctcggtcacattccggggagctgtatatcgacggcccgctgcgtacgccgaagcttccggaagggcccgctgatcgactttaccgttcgcagtgagcggaatcgcgtcaatgaaagcccatttgaccggaatcatataatcaggcagctctttggccaaatcacttcgcagctgagaaggatcagtcgcttgtgagacgctgcagtaggcgcataattcattttcgcccgactcattcgtttgaatcagcacggcagcttctttcacggcatgatgatttgccagaacggtttcaatttctttcggttcaatccggtaccctctgatcttcacttgatcatctgtccggccgatgtattccatttggccgtccgcacgcagtcttgccaaatctccggtccggtacatgacggcgccctttctgaacggatccggcaaaaatttctcttcggtcagcgccggattgttcacatagcctcttcctgtattcgctccggaaatatacaattctcccgcaattccgagaggctgaagctgtctgtttttgctgagaatatacatcttattatgatggatcggtttcccgatcggcggatgttcaggtatgtcatctcccgcagaaatcgtatacgttgaaaccacatgggtttctgacgggccgtaatgattatgcagctgcataccgtgtaaacggagcgtctgcctgaacaaacgtgagatagtcagctgctccccggccgtaatgacatgcttcacacagcggggaaaagactgtgcataaccttcttcattgaaaagcatcttgacaaacgcagtcgggaaaaacaccacttccgttttgtgctgatcgataaacgaatacagctgagaaacatcccgtttgattgattcgggcacgatacaaagggtgccgccgctcaagagtactgaaaataactcctgatagcagacgtcaaacgccaaagatgcgtactgcagcacatttgtgcaaaaatcaatgcctgtgttcgtcaattggtcagaaagaaggttggccatatttttatgttcgagcagcacgcccttcggtttccctgtcgtaccggatgtataaatcatataaaggaggtcgtccgccgtattaatggattgcacattgcttccgtccgcttccgtcccggcctcttctatatatgtaacctgcagcgtttgttccgcggggagtgactgatgccgctctgttacaacatggatgcagccgctgttttcaataacatatcggatacgctcctttggactgcccggatctatcggaacaaaggcgccgcccgcttttaaaataccgagaacggccgccgctaaagaaggagaacggccgagcatgacgcctaccggctcctcccgctttaatccgcgtttttgcagcagacgggccagcttattagccgattcattcagctctttgtacgtcactgacccgccttcataccggatcgcgatttgatccggcgtttgtgcggcctgccgttcaaacatcgcatgaatcgtgtcatactcaggcttttcagtctcttcagaaatcggcgcaagcagctgctctttttcctcaggagtgatgattacaagcttatccggcgtgatatcaggtttgtcgagaatctgggaaacgatatgtgtcaaatgacctttgatattttcgataaattggcggtcatacatgcttgaatcgtatctcattttcaagtgaatctcgtcacccggcgccaccatcaggtaaaaactgtaattggtttcgtcttccatgctgaaatcatggatgtgaaaaaggtctttcgtgtcccccttgctgttcagtacatcaagctcctgttcaaccggataattctcaaagacgagaatatggtcaattaagccttgttttacctgtgaattcgcctgtatatcataaagcggatgatagctgtatgcctgtcctttcaaagcgtccttttgcacgtttttgatcagcttttgaaacggaatgtccgccccgctgatccggacaggcacggtattaatgaacaggccgatcattcgctcgatgcctttgatttcagacggccttccggaaataacagaaccaaaaaccgcatcttctgtctggttatacgcctgaagcaaaatgccccagagcgtgtgaaaaatggtgctcagcgtgacctcttctttcacggccagatctttcagcttagctgtgtcctcttttgaaaaggaaaacgtcacttcctcttggctgctttcgccggcttttttctgcttcggcagaacagtctgctgctcaaagccttcaaggtatcgctcccagtacgaagcggctttttctttatcttgctccatcagccacttgatgtaggtcccgtacggcacagcgggctcaagcgttaacggtgtccggcggagccgcgaggcgtatatctggaagaactctttcagcacgattccgagacaccagccatccataataatgtgatgaaaactccatatgcacgtatattcacattcaccggtttgaagcagcgtcacccgcatcagcatgtctttttgcaggtgaaatcctttctttcggtctcttcgtttggcttcttcaatatgcttgatttgatcagccttgtttaaattggtgagattttcctcaatgatgctgacgttccgctcttttaatacgacctgctgcggcactgacacgttctggctgataaagatcgttctgaaaatatcatgtctttcgaaaagggcatgaacgctctcttcaaacacgcgggtgtcaaccttccccgttattgaaaaggaggcctgctcggcgtaagcctgtgattccttttgcaggagggaatgaaaaagcattccttcctgcatataagacagcggataaatatcctgaattgcattcttttttgtcatgttataatctccccgtcgcctttttctacagttcctcgacaaaactcgctatgctgtccaaatcatcagatgttaacgttttgctgctaaaatcactaacggttttttctgcttcctctttgcctgtgcagtgcgccataatatcacgcaaatattgctgtaaggtttgcagcagctgttccatcgtttctttgcggaagcggctcggcggatagctcaaactgaagtgcagtttatgttgagcggccatcgcgctcatttccaccgcttgttcccgctgccatgtcggcgtgatgtcgtgcccgctcgcaagaccggataaactgaatgtgggctgatcttctgtatcattgaattgccctaaatagttaaaactgatttcaggcgcttgtctgaagcggattgttttttgttcaggcggtgtcatgtattttaaaatgccgtagcctattcctttatccggtattcttccgagtgtgtctttgaccgtttttacagccgttccaagctcagcgcctgctgtgttcaagtcaatgagcaccgggtacatggaggtaaaccagcctacggtgcggctgatgtcgagctccggcatgatgtgctctctcccgtgcccttccatcgcgatgcgcagtctgccgccccctgtccagtcccgtaaagccaaagctgcggcagtcagaagaacatcttgcgtatcggtatggtaggcccggttgacctgctgaagcaaaacggacgtttcttcttctgtaagcgtaaagcttaccgtttgccgaatgctgtcggctcccgtctgatactgcggtttttcataaggaagtccggcggctgtttcttcttcaataaaacgccaatattcttcttcacgcatcagcttgctgctttttgcgtattctgaaagccttacggcgtattgcttaaacgaatcggtctttggcggaagctggaccggctgaccttttacggcttgtgtgtaagcggcagataaatcctccagcagaatacgccatgacactccgtcaaccgccaggtgatgtacggtgatgaataaataatcccctgaccgggttttgaaccagccggcttttaataacggtcctttttcaatatccatccgctgttggagcgcagccacttcatcttctatttctctttcccaagtatctgtctcagacagatcccaaatgtccaagctgtacagttcatctttttgaataccgtgattgatttgtctgatactttcgttttctgcactgacggtgatccggagtgcatcatgatgaatgacaagatgctccaaggcttgtttgagcggctgtttatgcaatgcgtcagagctgaacatcatgacggactgattgaaatgatttctgttttccatccgctgtgataaaaaccagtgctgaacgggtgtccaaggtatgtctccttccaccggttgctgatcgatgactctttccgctttccggataagaggcgcgagttccttaatggacggatgccggaataagtcacttgccgtcattttccacccatagcgtccgagccgtgcggcaacttggagcgctttgattgaatcgccgcccaactcaaaaaatgaatcctcaatcccgacttgttttgtgccgagcacttcctgccagatcacggaaagctgttcttcaagctcattgcggggagctgtgtacgcggtttgaagcgcgagctccggttcgggcagatttttccgatccaatttaccgttcggcgtaagcggcagcttctcaagttccatcatataggccgggaccatgtaattcggcagttgcttagaaagtgaagaacgcactttttctgtatccatgtccgcctgcagactcatatatgcgatcagttctttattgccggactgcccggttctgactgacacggcagcttctttcacgccgtccaggctccttagtgcggcttcaatctctcccagctcgacccgataaccgcggattttcacttgatcatccatccgtccggcatattcaatcgttccgtccggcagccagcgggctaaatccccggtgcggtacatccgttctccgggaacaaaaggattagggacaaatttttcttccgtcagctcagggcggccgaaatatcctcttgccacaccgtctccgcctgtgcataattcaccgatgacgccgatcggctgcggtgttcccctgctgtttatgatatatgcagttgaatttccgacagggcggccgatcgggattgaatgatcgtatgattgttcaatcaaaaagcaagtcgagaacgtcgtgttttcagtcggtccgtatccattccatattgaaagatgcggcagcgttttccgaacccggtttacatgacttggggacagtgcttccccgccgataatcaatcgggataatccggaaaacacgtgttcattttgttctgatagatgattgaacaaagacgatgtcagccacagtgtcgtaatgccgttttgctgtataaatgtttccagaacatcagagtcgagataggtttcctggtcacttacatataaagaagcaccgtttaaaagcggaccgaatatttcaaatgtcgttacatcaaatcctaatgatgaagtaaacaacagtctgtctttcggcgtaaaatcaatataattgctgtttttcacaagacggatcacacttcgctgttcaatcatgacgccttttggcgcacctgttgacccggatgtataaatcatgtaggccaatgattcaggtccgccgagcggttcgggattttccgaacttaagccggcctttgtttgaatatcctctatgaataaacgttttccggaaagcggcagaccgtcaagtttatcagattggagaagaatatcagctttacagtctttaagcatccattcagcccgttcccgaggcacatcgtcaccgataggcaagtaggcgcctcccgcttttaatattccgaggattccggaagcaagctctgttgtacgtccggttaataaggcgacaacactttccggaccgacgccatttgatcggagagccgccgctattctattagcccgttcgttcagctcacggtatgtcaagatttgtccatcatatacaactgcccgggcatcgggggtttcttcagcctgccgctcaaataaacggctgatggtttcgtgtcttgggtaatcgcttttcgtctgattaaactgataaataacgcgatttgtttcagcatcatccagtacgtgaatgtcaccaagcggtattgtttggtcttcaattacttttgtaagaatacgggtaaaataagaaagccatttttcgattgtctgtttttgatagatatctgtattgaattcaaaatcaaagctgatggaaccgtcagacccttctgccgcgtaaagcgtggcatcaaactttgcggttttatgacctgcatccgcggcttgagtcaaatgcagctcatttaaattcagggattcacgctccatattttggagcacaaacatcacgtcaaacagcggattacggctcatgtcccgctgcacgccgagccgctccacaagctcttcaaacgggtagtcctgatgttcatacgcctcaagcgccgcctggcggacttccgccaaataatcggtaagccgtttgtctcctttcggctccgttctgatggccagcgtgttgacgaacaccccgagaatcggttcaaggtctttgtgcgggcgcccggcaatcggcgatccgacgatgatgtcttcctgcccgctcaatcgcgcgagcagcgtattgtacgcggcgagaagcaccatatacaaagtggagccgtgatcccgggcgatgcggtgaaggccggatgccgtgtcagcgtcaagcgtgcacgatacgctgccgcccgcaaagcttctgaccgccggacggggcttgtcagccggaagttcaagcaccggaagctctccttcaagccgcttcagccaataggcttcctgcttctgatatccttctttctcctgaaacgaccgctgccagacggcatagtctttatattgaaggcgcatcggcgcaagcgaacggcctgcgtacagctcgccgaattcttttatcaaggtgttgacggacacaccgtcagaaataatatgatgcatatccgttaataaaagatggtgttcttccgattctttcacgagggccgcacggaagagcggcgcttcctccagacaaaacggccggacgaatgcgtcagctgactcggcctcatcgagctgaaacggcacgctgtcatggatgcgctgcaccggttcgccgtcaggccccgtttcaaaggacgttctgagcgactcgtgccgctccacaagctgccggaacgtctcctccagccggacacggtcaagcgggcccgtcagttccagcacagccggcatattgtagccgacaccgccgtcttcaagctgttggagcacatacatccgtttctgcgctgaagacaccgggtaggtatcttgtgtttgcgcaggctgaatcgcttcatacgagctttcttccaagtcctgaataaccgaagcgagctcttccaccgtcggccgggcgaagatgtcctgtaacggcacctgaacaccgaactctttggcgatgcgggagacgagagccgtcgcttttaacgaatggccgccccgctcaaaaaagtgatcccggatgccgacggggccgtttttcagcacctcttcccaaagggcgcaaagcttcatttccgtgacgttccgcggggcagtgtacgcctgtctgtctgccgatccgccgggagccggcagcgcgcggcggtcaagctttccgcttggcgtgaccggccattcgctcatctctataaactgagccggcatcatgtaggccggaaggcgtgtcgcaagctccgcccgcacgtcatcgctttttcgtccttcaatataggcgtaaagcgcggtttcgccgtgttcggtccgggcggtgaccgccgcctcacgaatgccgtcgatgtgccggatcgccgcttcgatttcccccggttcaatccggtagccgcggactttcacctgtccgtctgaacgaccgagccattcgacaaggccgtcttctgtccagcgtgcgatatcgcccgtctgatacatgcgttctcccggataaaacggatcaacgacaaagcgctcctccgtcagctcagggcggttcagatagccccgggccacgccggtccccgcgatgtacagctctcctgccacgcccgcaggctggatggttcctccgctatctaatacatacagacgggcacccggaacgggttttccgatcggaagccttgtccgtccgctgtcccgttttcggtcacagacgtaaaacgccgcatcaaccgtcgcttccgtcggtccatagccgtgaataagcatggtctccggcagaagatcggcaaaccgggcagccgtaagcggggaaagagcttcccctccggcgaacacgcgtgtcagtgttctgccgaggcgtgttcttgtttccgcaggctctgtttccagcgcgtctaaaaagctgttgaccatcgccggaataaaatgcgcggtcgtcaccttttctgaggcaaacgcttcaatcatccgcacaggatctttctcccagccggccggaagcagatacacggaggcgccggacatcgtccaccaaaacaattgccagatggaggcgtcgaatgaaaaggatgatttcagcacgataatatcctcttccgttaacggaaactgcccttgcatccctgataaaaaggcggcggcttgacggtgttcaacagccactcccttcggtgttcccgtcgaaccggacgtataaatgatataagcgagcgaatcagcatccgcttcttcagagacagcccctgtctccgtctcatttgtcagagaagaaagagacacttctagcgtttcaccggaaaaaccggaaacggataaccccggctgtgcaagcaggagacaagcgccgctgtcctcaagcatatatcgcagcctgtcctcaggatactccgggtcaagcggcacgtaggcgccgcccgcttttaacacggcaagcactgaaaccgccatctccggcgagcgttcagcgagtacgccgaccatgctttctttgcggacgcctttttgtcggagccggacggcgagcctgtccgtgtactggtcaagctcagcgtacgtcagcataccgcccggaaaacggagcgccggacgatgcggcgaaagcgcggcgcggcgggcaaacagcccgtgaagcgtcggagccggcggttcaaccgcttctgtatggttaaatgcatccatcatacttctggcttcacacgcatccagcaatgcgatctcggaagcgccgatttcagggtcggaaatgactgagttcaccatatgccgtaaaaatgtttcgatattcttcataaaaacatcgtcgtatataccggtatcaaattttaagcggatataaagagaattgcccggaatcacctttatgctgcatccgtagtttgtgacttcttccatcgtaaaatcctctaccgcaaaatcaaatgaaccggcctgactcacattttcaatttcacgctgggccggcacattttcaaacacgataatgtggtcaaacagcgcttgcttcagagggctttgcgcctgaatgtcatacagcggataatagctgtacgcttctgcttgcagcgtctcctgctgcaaatgcctgacaagctccagaaaagaaaatgaaccgcttttcacccgtacgggaatcgtattgataaacagtcccaccattttttccacgcctgcgagatccgacggccggccggaaacgacagaaccgaaaacggcatcatcacagcggctgacacgctgcagcaaaatgccccacagtgcctggaacactgtattcagcgttgctcccgcccttgccgcaatgttcttcagctcatttgtctgctcttcagaaatggtgaaaaccgcctgctcaagttcgccgtttggttccgcggattttttcggaagagacgccgtttgctcaagatcggcaagtctcgttttccaaaaaatctcggcttctttacgatcctgcttcatgagccatttaatatacttcccatatggctgaacgggctcgaggaacggaagccgttcgtctccgagagattgatagatcatcagaaattccttcatgacaattccgaagcaccagccatccatgacaatatgatgatggctccatatacaaacatagcgttcaggcgcttttttcaaaatggagactctcatgagagggtctgattgcaaatcaaagcctttatctttatcttcttttctaaaccggtcggcatatttgtcttgtgccttctcgtccaaatgagaaatatcatgaaactgaacgcggctcggcctgtttttcaacacgacttggcggggctttgccacattcttgtgaataaatgtcgtacggaaaatatcgtatcgttcaaaaacagtgtctatacttttttggaaccgttcccggtcaagctgtccgctgatcgtaaacaccgcttgttcgaagtaggctcttgagtcatgatccaacagagaatgaaaaagcatgccctcctgcataaaagacaaaggatatatatcttgtatttccggttgctgccccattgcgccactccttttctatagtttgttgacggctcccataatgtcactcagatcttccagcgttaactcctcgtcactgaaatcagcggcgctccattcacgctcctctttgcctgtgcaatgcgtgataatctgcttgagaaaggtatgaaaatatcccgtcaaaacttcaatcgtttctttttgatactgaaaacggttgtacacgacatgcatgctgagacattccgacgatacggagccgctgatatcaagtgtgtacggacgttcccagtctgggctgacttcatttcccgcttttacgggagaaacaccgaagccgctggaacggatttcccggtcaaactgtcccagatagttaaaactgatttcaggagaatcagattcagtctctccccagagtttgcttatatatttcagcaccccgtatcccgctcctttatgcggtatgcggcgcatcatgtcttttgtccgcttaatgtgatagccgagacgctcgccgtcatcaggctgatcttgaaaacttgcgtcaaccaataccggataaattgacgtaaaccagccgatggttctgctgatatcaagatgctccaggtgctcttcccttccgtggccttccatgctgattttgaatgtctcgtttccggtccatctgttcagcgctaggcttaacgcggcaagcaataattcgcccgtctctgttgtgtatgctctgttcgcttccgttaacagctgctcggtctcctgttttgtcaatgtaacggtcatcacatctgtatctttcagaagattggaagagatgcgggcatctttcggaagcggtttgaccgccgctttttctctttcggaccagtagtctgcttcctgtaacagccggcggctttttgcataatcagagatttgcttcgcgtaagtctgataggaatcggtttttgccggaagcgcggcttcttttccttcgagcgcctgcctgtagcacgcggtgagatcttcaaataaaatccgccatgacactccgtcaatgacaaggtgatgaatggaaagcagcagatgatcgccatcattagcgtgaaataaaccgacagctacgagcggacccgtctccagccgaatggaagtttgaatgcgggcggccgcctgttcaattgcggcgtgttcctcttgtaataaccctttccctctcacgtcatgcgtttcaaatgtaaagagttcttcttcagaaaggttatccgctctgttatattgaatcactgatccgttttgcgtgccgcataccatccgtaatgcgtcatgatgaaccgcgagctgtgccagcgcttttctcatagcagattcattgatcctgtccgcactgctgagcataacggactgattaaaatgatcatgcggcaatgattgcgaaaagaaccagtgctggatcggcgtcagcggcacgtctcccgtgacgggagcctgatcaatcacgcggcggactttccggagccgcatcgagacttctcccagtgtctgatgctcgaacagctcgcggacggtcgtttcatagccctgctgtttcagcctcgcacatacttgcagcgctttaatcgaatccccgccgagatggaagaaatgagcattggggccgagtccttcaacacctaagagttcttcccagatgtcagccatcatttcttcagtttcatttctcaggctgatatcatctccaaggctttcatttaattcaggctgcgggagcgccttctcgtccagcttcccattcgccgtcaaaggcagttcatcaagctctatcaagcgggcgggaatcatatattccggcagaaaagctctgagagaggcctgaacctctgcttcttttattttttcattcccgtgtaagaccgcgtatgcgtaaatggagtgctgaccgtgctgatcagcacgtgtgatcacggcggcctctttcacgaaggaaagctcctgcagcgctgattttatttctcccagctcaattctgtggcctctgacttttacttgcgcatctttccgcccgacatattccagctcgccatttgagagtcttttggcaatatcgcccgtccggtagagccgcatgccggtaatgtgcggattcgtgatgaaccgggaggcggttaaatcatccctgtttacatatcccctcgcgacgccttccccgccgatataaagctcacctggaattccgatcggctgcggattcatataggcgtccatgacaaaagcatggagggtttccagcggtctgccgatattgcttttatttctctcaatatcatccatattcagttttttgcatgtgacgtgaaccgtggtttccgtaatgccgtacatattaacaagctctgtctccgggtacttctctttccagcttttcagcatgccgggctggagcgcttctccgccgaaaatgacatatcgaagcttcagcttgtccgcatgcccggcttcttcatgaatgagtccggaaaaagccgtcggcgtttggttcagcaccgttacgccttcactttgcagcagctgccggtacaaatgcggatcacgggcagtttctttcggcacgataactacctttccgccgtataagagcgcgccgaatatttcccagacagaaaaatcaaagcaataggagtggaacagggtccagacgtctccagtgccgaaatcaaacggcagtcctttatgtgtgataaggctgatgacattgcggtgctccgtcataacgcctttcggttttccggttgtgcccgatgtgtaaatcacgtaagccggctgttcaggcgttatcatttctttcgttctgtctgctgaaacggattcaggcttatcgatgtataaaaccggcagcccgtccattccggatatcccaagacccgattgcgtcaacagaacacgcgcgccgctgtcagtcagcataaatgaaatccgctcgtcaggatagtcaggatcaatcggcagataagctcctcccgcttttaaaataccgaaaatcccgatcagcatttcaggagatcgttcggtcataattccgacaatctgtccggagcggatgccgttttccgacagcatatcggcgattcgatccgccttttcattgagctcgcggtaggtgagacgctcatcggacataacggctgcaatttgatccggcattttttccgcctgtgcctcaaataaactgacgatcgtctcatgcctcggatactcagctgtttgattttccgcttgaagaagcatctgccgctcatttgtgtccagcaaatgaatgtcagacagcttccgctcatcatccgatgcgatttgtcctaaaagctctttaaaatgaccggcccaccgttcgatcgtacctttttcaaacaacgcggtactgtattcaaaatgaaaatccagtgagccgtccggccgttcctcggcatgaagcgtcaagtcgaattttgaaatgtcatgtttcactgcatgtgaagaaacggataagcccggaaggttcactttgaaatcatcactgttttgcaaaacgagcatggcatcaaacagcggattgcgattgacttcccggtgtgtatcaagcttttgggcaagttcttcaaacgggaagtcctgatgttcggctgcgccgagggcgagcattttcacctcttctaaataagcgcggaatgttttatcccctttcggcctgcttctcattgccacggtatttacaaacatgccgatgaccccatcaagctcagcgcggcttctgccggccgcaggtgaaccgacgacaatgtcctcctgcccgctcaatttagaaaggaacaaggagtagcctgccaaaagaatcatatacagtgtcgaacccgtctcatccatgagccggcgcaaattctccgccgtttctttttgtaggcgcgttcgaacaacggacccgctgaaatcaggaagctgcgggcgctttttatcgagcggcagatcaagaaggggaatattttccccgatcgcatccagccaataccgctcatgtcttttgaattcttcagcggcgaaccgctcatgctgccagacggaaaaatctttgtactgaagttttaacggccgcagctcttttcctctgtacaaatccgtcaattcttggatcagaacgctcattgacacaccgtctgcaataagatgatgcatatcaagcagcagaaaatgacgttcttcagtggctttggctaaagtcactctcaaaagcggcgctttttccacgtcaaacggtttgacgaaagtttccatcgcctcttgaagaagtgtcccggatggcatgtgaatctctgtgagatcgagatcgacatgtgaatgtacgtgctgcatcggctccccgtttcgtaaaacaaatgatgtccgtaacgcttcatgcctttgtaacagcgctgaaaaggcttcgtgcagacgatcacggttgagtctgccgctcagttccagacaagcgggcatatgatagcccgtactgtccgccgcaagctgatgaagggcataaagccttttttgcgcaaaagatagcgggtacaagtcctttgcctccgcaggcgtgatttctgcatattctcctcttttcctctgttctaggaagcgggccatgctctcgatggtcggatgttcaaaaacatggcggacggcaagttcaatttgcagccgtttatgtatctttgaaacaagcgacgcggctttcagcgactgtccgccgatttggaagaaatcatctctcatactgatgtgttcccgtttcagcacttcttgccaaatagacagcagctcagtctcaagcattgtgcgcggagcttgataatcaccggttctctcggcttctttcggctcaggaagtgcggcccggtcaagttttccgctcacagacagcggcatttccgtcaatttggtaaagcttcccgggatcatataagcaggtaatctcccggccaattcggcatgaggatcaaatgtcacacccgcgttttccagtacggcataagctgcaagctcctgttccccgtccgccgttttgcgcacgatgactgccgcctcttttaccccggacagacttctgagtgccgtttcgatttctcctaattcaattctgtaacctcttaccttcacctgatcgtcaaagcgtcccatatattcaatcgttccgtccggtaaaaatcgggctgcatctcccgttctgtacagccgttcacctttacgaaacggatgaggggtaaagactttgtccgtcagctctttttgctgaaaatatccgtccgccagaccttttccggaaatacacagttcaccgacggctccgaccggttgcagccgatctccgtgcatcatatagacagaagtgttggcaatcgggcgcccgatcgtaatccggctgcttttttgcaggttgcgcagaatcgtcgtggccacactgttttccgtcgggccgtattcattcagcagctcggcattcgggcatatgttgcggctcgcttccacgatatcaggagtggccgcttccccggcaaatgtcaccgcccgaagcgtctgcgcatcctttttcgtcagcgaatcaagcagaacgcgatacagagacggaacgatcagaagatggcttaccccgtggcgggcgattttctgttttattgaaaggacgtctttcgcatcatcttcatcagttaacagtacacaggcgcccgacagaagcggagtgaaaagactcgttaatgacccgtcaaatacgtatgaaaaaagatgaagcgctatgtctccttctgtcatcccgtattcttcacgccgccattgcaatgtattgctgatcgctttgtgttgtacaagcacccctttcggccggcctgtcgttccggaagtgtaaatgacatacgcccaatttccgctgtcagacaccggcggaagcggtgcagtctgctgggaaaccgtttcctccatgatgacgacgctccccttgaaatgcggcggaatgagggggagcaggtctttttcagtcaggagcagtgaggcttcactgtctctcagtaaaaatgaaatccgttcaggcggaaattccgcatcaatcggcatataggcgctgcccgacttccaaattccgagcagagcggcaaccgtactcattgatcggcgcagcataacagcggtgatctgatctgaacgggcgcctttttcccttaacgcatgggcaatctgatttgcccgctgatttaatttcttgtagctccagcttaccccgttatatctcaacgcctcttggtcaggcgtttttgccgcctgttcttcaaacagcccatgaacggttgtctcagggtacggacggttcgtttcgttaaacgaatgaatcagggcttcttcctccggtggtacgagactgatgcttgataaaagcctgtccggatcttccgttacacaggagatgacctctagaatatgccctttgatccgtttcatgtcttcccgatcgtagatgcccgcattgtagctgaatttcacataaaactcttctcccggaacgatgacgacgttaagatcgtaattggtttcctccgccatcgaaaagttttcaagtgagagcgcatggctttccgtttgctgccagccgtttaccgcagcctgcatctgaaccggataattttcaaaaaccaggatgtgattcaagagatctttttgcaggccgctctcgttttgaatgtcataaagcggataatagctgtgctcttccgcagcgagtgactctttttgcacctttttgagaagagaagaaaaagtcatatcaccagccgcgcgcacccttaccggcacggtattgataaacagtccggccatggattcaatgccgctgatagctgaaggcctgccggaaacaaccgaaccgaagacggcatcttcagtcccgttgtaacgatggagaagcagaccccaaatgcccgtaaatatagtattcagcgtgaccccgatgcctcgggcaatgtctgtcagtttttgtacggtttcaggctcaagggaaaattggaaatgctcagatgcataaccgttttgcgccgtcttattcttcgtttgcggaacggaaacggtttctccgtaatcttccaagcagcgcgaccagaatgctgacgtttcttctttattccggcttcggagccatttgatataagtgctgtaaggagccggactgccgaggtttacaggccgcccgctccggatcgcataatacatgctgaagaaatctttcagtacaaggcccaagctccagccgtccatcataatgtgatgatgagtccaaacgcacgtatggcggttttctcccgtttgaaaaagagtcaggcgcattaaggggcctttttgcagatcaaaccccttatgccggtcggtttccttgaatttgtcaatgatgctttgctgccgttcttccgaataatctgaaatgtcttcagtccgtacggcagtgtcacggcgtgaaaggacaacctgctgcggcccttcaaggtcaggcacttcttttatgaaaatcgttctgaaaatatcataacggctgacaagcatatccagacttttttggaatgtatcaatgcataaatccccgctgactgtaaacgaaatctgctcaacatatgcgtttgatccggaatccagaagcgaatgaaacagcatgccttcctgcatatatgataaagggtaaatatcttgaatttctgtcgcttgtgtcacgaatgccacacacctttttatgaaattaaagtccttttacgagatcttcaatgcttgatagggcttgagcggtcaattctgtatggctgtaatccgttaatgttttttcccgctctttcttgccggaacagtgggcgatgatgtccccgaggtgagtatggaaacgattcatgaagaactcgattgcccccggtgcaaatacatcggtataaacggcttttacctccagttgcccggccgccaccatcgcgttaatatccagatcaaactcgcggatgcgcccggccgctatatcatgctgcggcttgaacggtgacatcttcagcgtcccctcaagaccgtcaaacgcaccgagatagttaaagcttatttctgggtctttataaagaatgtttcgcgaatatctcagcagcccgtagccggttccgtgatgaggaacccgtctcatcatgtcttttaccgtctttatgcggtgcgcggttgtttcccctgagccgtccggcactctcatatccaaaagcaccgggtaaacagatgtaaaccagcccgccgttcttgacatatcaatgtcaggaatatgcccctggcgtccgtgtccttcagtgctgataaggatctgttcggaacccgtccactcatgaagcgtcattccaagcgccgttaaaagcaattcatgaacatccgttccgtacgcctgctgtgtttccatcagcagctgcttcgtgacttcgctgcttaatatccatgatgcagtgcgcgcgttttcctgcaatcgtccggcgttttcatcagttattttcggcagcggcgctgtttcaccagacatcacgctgtcccagtatgcggcttcctccagcaatgctttgctcttggaaatgtcaaaaagctcttcggcatactttatataagaatcgcttttcggcggcagttcgatttgtttgccgtccaatgcctgctgatatgctgtctgcagatcttcaagcaatattctccacgacacgccgtccgtgataaggtgatgaatcgtgatgagcagatggtcggcttctttcagcctgaacactccgagatgaagcagagggccttgatcaaggcgcatagcctgctgtatttctttttcctcagcggctatccgtttttccggctgtgtttcttctgaaagatctatgacgttaagcgtaaagatttcttcatgctgctctgtgattccgcggttatattgaacaacttccccatgctcattttcagtgaaagtcattcgcagcgcatcatgatgttctgtcagcgcgcaaaccgcctgatacagcgcatctatttcgaggctgtcttcactgcacagcatgactgattggttataatgaagctcaaacgcacccggctcctcaaaaaatctctgctggatcggtgtcagcggagcgcttccttctatcgggccctgatcagccgttgcaacagccggcgtgaggtgcttcgcgagttctgcaatcgtcgggaactgaaacaaatcgcggatcgacatgttccagccttctccggcgagtcgggctgacacttgaagcgccttaatggaatctcccccaagctcaaagaaagagtgatgaattcccgctttctgaatatgaagcacatcttcccaaatccggcataacatcgcctgtttttcatcgccgggcgcgacaaatgcctgtgatgaatgtatctcttctgccggcaatgccgatttatcaagtttgccgttcagtgtaaggggcatgctgtctaaaccgataatatgagacggcatcatataagccgggagctcctgcataagagactggcggagtgatgagatatcggcctctttaggaacgacgtatgccgctaatcgtgcttgtccttcggcatctttcatcacggtaacagccgcttctttgacttgatcgtgtttcaaaagcacactttctatttctcccgtctcaattctgtagcctctgatcttcacctgcttatcgatccgccctttaaaacgaagagttccatccggcagccagcaagcctgatctccggttctgtaaagcgtttctcccgtttgtaacgggtcactgaatgcgtcctctgtcagctcaggctgtccccaatatcctttggcgacgccggcgcctccgatatacagctctccgaaaacgccgatcggctggacctgtttgtctttgtttaagacgtacatttgcacattcggaagcggaacaccgatcggcacatcatcttcccgcggctcttcgctcatttcggcttcataatacgaagagtcaattgtcgcttctgttacaccgtagctgttaatgatccgcatttctttcccaaagcgttcatgaagcgtataaaaatcttgcgacttgatcatatctgaaccaagtaccagtatttttacgctttgcagcgcgagtttccggcggtatatatattccataaacggaacaatcagcgcgggtgtcgactccataaacgtgatacggtgctgatcaatgagccgataaagctgctgcggctcaagccggacgtcatccggacaaatgacaagcgttcccccgtttagcagggcgcgtgctagatcccctgaaaatacatcaaatgagaaactcgccatctgcagcactctgaccggtataagatcaagctcataaatcctgcgccatgcaagtgctgcatgcgtaaagctgcgatttctgacttcgactcccttcggcgttcccgttgttcccgaagtatatatgatatatgcggtatcatccggtgacgctgtcggctgaatattctttgcggaaatatcgtattgatcttcatgatcaagctgaatgagaaataaattgtgatccgtcagctgtgaagcaagttctttgtattctgactgcaccatcaagacggatgccgcgctgtcttttaataaatagcgaatccgttcctcaggataatgggagtcaaccggtatatacgctcctcctgatttcatgaccgcaagaacactgacgatcgcttcaatcgaacggtttgctaatatggctgctctttttcccggaccgaatccatttttctgcagtgttcgggcaagacggtttgcccgctcattgagctggaaatagctgatctgttgtgctccttcaataacagcggtctgatgaggcgtttcttctgctttctcttcaaacagctggtgaaacagtttgtgtttttccatgaattcggtttgtgtgttattaaactcaatcagtaacttttgtttttcttcttcatccaaaatgtcagctttcgatagtgtgacttccggttcggcggcaacatggcgcaagagattcagtaagtggcccatccagcgttcaatcgtttctttcataaaaagctcggtgctgaattccatctcaaagcggatgtttccatcggattcagccgctgataaggtcaggtcaaaacttgatacatcatgttcggtatgctttgatcgtgacgccttcagaccggccagatttatctcctcccgctccatattctgaagaataaacatcacatcaaacagcggattgcggctcatgtcccgctgcacgccgagccgctccacaagctcttcaaacgggtagtcctgatgttcatacgcctcaagcgccgcctggcggacttccgccaaataatcggtgaaccgtttgtcccccttcggctccgttctgatggcaagcgtgttgacgaacatcccgagaatcggttcaaggtctttgtgcgggcgcccggcaatcggcgatccgacgatgatgtcttcctgcccgctcaatcgcgcgagcagcgtattgtacgcggcgagaagcaccatatacaaagtggagccgtgatcccgggcgatgcggtgaaggccggatgccgtgtcagcgtcaagcgtgcacgatacgctgccgcccgcaaagcttctgaccgccggacggggcttgtcagccggaagttcaagcaccggaagctctccttcaagccgcttcagccaataggcttcctgcttctgatatccttctttctcctgaaacgaccgctgccagacggcatagtctttatattgaaggcgcatcggcgcaagcgaacggcctgcgtacagctcgccgaattcttttatcaaggtgttgacggacacaccgtcagaaataatatgatgcatatccgttaataaaagatggtgttcttccgattctttcacgagggccgcacggaagagcggcgcttcctccagacaaaacggccggacgaatgcgtcagctgactcggcctcatcgagctgaaacggcacgctgtcatggatgcgctgcaccggttcgccgtcaggccccgtttcaaaggacgttctgagcgactcgtgccgctccacaagctgccggaacgtctcctccagccggacacggtcaagcgggcccgtcagttccagcacagccggcatattgtagccgacaccgccgtcttcaagctgttggagcacatacatccgtttctgcgctgaagacaccgggtaggtatcttgtgtttgcgcaggctgaatcgcttcatacgagctttcttccaagtcctgaataaccgaagcgagctcttccaccgtcggccgggcgaagatgtcctgtaacggcacctgaacaccgaactctttggcgatgcgggagacgagagccgtcgcttttaacgaatggccgccccgctcaaaaaagtgatcccggatgccgacggggccgtttttcagcacctcttcccaaagggcgcaaagcttcatttccgtgacgttccgcggggcagtgtacgcctgtctgtctgccgatccgccgggagccggcagcgcgcggcggtcaagctttccgcttggcgtgaccggccattcgctcatctctataaactgagccggcatcatgtaggccggaaggcgtgtcgcaagctccgcccgcacgtcatcgctttttcgtccttcaatataggcgtaaagcgcggtttcgccgtgttcggtccgggcggtgaccgccgcctcacgaatgccgtcgatgtgccggatcgccgcttcgatttcccccggttcaatccggtagccgcggactttcacctgtccgtctgaacgaccgagccattcgacaaggccgtcttctgtccagcgtgcgatatcgcccgtctgatacatgcgttctcccggataaaacggatcaacgacaaagcgctcctccgtcagctcagggcggttcagatagcccgggccacgccggtccccgcgatgtacagctctcctgccacgcccgcaggctggatggttcctccgctatctaatacatacagacgggcacccggaacgggttttccgatcggaagccttgtccgtccgctgtcccgttttcggtcacagacgtaaaacgccgcatcaaccgtcgcttccgtcggtccatagccgtgaataagcatggtctccggcagaagatcggcaaaccgggcagccgtaagcggggaaagagcttcccctccggcgaacacgcgtgtcagtgttctgccgaggcgtgttcttgtttccgcaggctctgtttccagcgcgtctaaaaagctgttgaccatcgccggaataaaatgcgcggtcgtcaccttttctgaggcaaacgcttcaatcatccgcacaggatctttctcccagccggccggaagcagatacacggaggcgccggacatcgtccaccaaaacaattgccagatggaggcgtcgaatgaaaaggatgatttcagcacgataatatcctcttccgttaacggaaactgcccttgcatccctgataaaaaggcggcggcttgacggtgttcaacagccactcccttcggtgttcccgtcgaaccggacgtataaatgatataagcgagcgaatcagcatccgcttcttcagagacagcccctgtctccgtctcatttgtcagagaagaaagagacacttctagcgtttcaccggaaaaaccggaaacggataaccccggctgtgcaagcaggagacaagcgccgctgtcctcaagcatatatcgcagcctgtcctcaggatactccgggtcaagcggcacgtaggcgccgcccgcttttaacacggcaagcactgaaaccgccatctccggcgagcgttcagcgagtacgccgaccatgctttctttgcggatgcctttttggcggagccgaacggcgagcctgtctgtgtactggtcaagctcagcgtacgtcagcataccgcccggaaaacggagcgccggacgatgcggcgaaagcgcggcgcggcgggcaaacagcccgtgaagcgtcggggccggcggttcagccgtttctgtatggttaaacgcagttaacacccgtttcttttctttttcatccgccatatcaatatgccgaatcagccggtttggatttctaacggcattttcaacgatcgtcagcaaatgagtttgaattcgtttaatcgatgttttagtaaataaagcggattgataatcaaaattcagctcaatcaatcccgtatctgtccgctccttaattaaaatggacagctcatttgccgtatgcccgctgaaaaacatcgccgtttcataatcgaaaccttctgcctgacgccacgcgagaggctggtattgcatcgaaatcccgatgatattttgcaggtcgtgatgaatctgccttaattcattgacaaaaagattgtaaggatatttctggtgccgcataacagacagctgctgttttcctacactgcggacaaaagacacgaactccgcatccggatctgccgtcattctgatcggtagcgtgctgacgaacatgccgagcatatccttttcgagcttggaaccgcggtttccgtaataagtaccgatggcaatatcctttttagccgtcagacggctgatgcatatgtataacgaagccataaacagagagatgatgctgacattatgatctttgcaaaaacgccggattgattgttctaaggagtgggaaagagtgattgtatctcttgaagctgcagtgctttgtctaagatgagaggttcgttccgccagtgaaaggtgttccggaacggttcggtatgtttcagtccaaaatgaacggtctttttgaaaacgggaagactgtaggtattgctgttctttttccatgtagctgagataggaagggctttggtgttcggccaaatcctcgcttcgcatgattttttggtagatttcaatgagctgattgccaagcagattgagcgagatgccgtccataataatatggtgaaattttgaataaagccaaacttcttcgtctgacatgacaagcagagtaaaatgatacagcggtgaatgaaacagcttgaacggaacacgcgtctgtttgtcaatccatgcatcccgctctgattgatcaatatgagtaaaatcaacggtctctaaagaaatcggccgatgcccggccagatacagctggggttctgagccgtccccttccgtcagttgaaacctgagcgaatcattttgcaagatagagaaatctaaagcacggcgcaatacgtcaaagtcgatattccccctgaatttgacgcacgccgcaagattgcagatacttgtgcccggctcgagcagctctgtaaaccagactcttctttgggcgtgagttaaagaataaacagtgttcttcaatggaatccctccatttcaatttaagaggataagaaagtgaaataattacaattaaatttcgacagcatatgactaaatcatccatataagcattattttaaaacatattttagaaatcacaataaaaaattaaattttttctaacattttttagaatatagtatatattcctcacttcacttcttcatttctataatttttataccatgtaaaacagtatgtatgtacactgcaaactggttctaaaacactataataaggaataaaatgtataattaattgcgcttttaaaaaggttttgctttccgaaaagaaattttatgataaaaaatgaaaaatcagtgaacaagtaagaaagtatcatgtaaaaaaaaggaagaatgttgccgatattactttttgaaaagattgattcataatcgcaatataatgttttacagacatcaaaaaagccgaaccctctaaggatccggcccttcttattgatttgccagcacgactgcgattttgtcttcaatgtcttttccgtcatcttcgtcaagcagcccgttttgaagcacggaaaaaataagcgtatctcctgtttttgtgtctgcatagccggcaatcgaactgactgatgttagtgacccggtttttgctttaattttgccctctgccggagtattcttcagccggttccgaagagtgcctcccgtcattctgtcgcttgcaccggcgacagggagcgaacgaaggaaagccgggtaccacttctctttctgaaccgcatacaaaagctctccgatttggccggcggatacgccgttaatatgagaaacgccggatccgtctcttgcaatcaattcatccggattgagcccgaacgatttgagctccgatttcatcacgtccaagcccttttcccagctgccctccccttttttcacttttcccatttccttgatcagaatttcggcgtgcccgttgttgctcagtttcataaacgggatcaataattctgaaagaggcatggatgtccgtgatgtgacaagctgggtgcggtgcggcattcggcctgttctgattttcccttttacagttacaccctgtttagtaagcgcttgtttccataaatctaaagcataggacgacggatcccacactgccgcccattctcttgcctttgccgagccggcaggtatggctccctttatcgtaatcacattgccaccgtgctcccgttcaaccgtcaattctttcttttcatcagaagcgacggtttttacttcatttttcacacgaacgatgtccgtatagggagaaattgaaatgcgcggctttttatcgggctgtttcgccgggctgatttccgcaatcaccgttccggtatcataatcctcatttggggaagcggtaagagctgatacttgcgcgccataatattggccttcatcactccacggaagatcaactgaatacctggtatcgtcataccacgaatcatccccgaccagatctcctttaatgacatggatgcctctggctttgacctgtttagccatcttctcaaaatcagaagccaatagggtcggatcgccttttcccctgagataaaggtttccgcgcagctgttttcctttcacggcgccgtctgcccgtacttctgtcttaaaggtgtaatcttctccgagaacggaaagcgccgcagatgccgtcagcagtttcatcaatgatgcaggcctcagccgcatatcttcccggctgccgaacagcacctcccctgtttttgctgaccggacaatgatgcccgctgaagccccctttaaagcgggttcttcatccagaatgtgttccagctctttttgcaaagtatttttttgttcagccgccttagccgcatcatcaatataaggaacttcggcaatgatcaaaagcagaatcaccgcgcacaagcgtttcacatatgttttcaatgttatcccgcctctttcctattcttcgtcatgcaaaatggtgatcccggatgacgcagccgcttcttcgcccggtttcagaatctgaagccctgtcagtgatgcaggctgattcagattaaatgcatctgtaacggaagtataaggctcaagactgacaaacccctgctttccgtcaccgttatataccacccaatgcttgaaagacgtgtctgcctgatacaaaacggataatttctcattcggatgataaataacagcttcgttattgccgccattccgtccggaagaaagaaaaacatcgtcaaactgtttatttttcaaagacatcccatgacggaacgcttctttatcaggaacatccaataaacggcccgtcggtacgaaacgttcatttaattcccacatgcggtcagccgtcaaaaatagacgggattgctcttcattgaaaacaaatgtggaatgatagcctagcccccaaggaaaagcctccgttcccttattcataatcagcgcccgctgcgtaaacacattgtcttttaatgtataggtcatccggacaatgacatcgtgcggaaattgtttatgaacacggggaatctttgaaagatcaatttctgtttcgactgtcattccatccccctcttctttcgctgctgccgctttccaatgctgattgtgaagaaagccgtgaatatgattatgtttatcctcttcgtttatctcgaattgatacgagcggccgtcaaaacgaaacgtcccgtccgtaatccggttcggcgggaataaaacgggaatgccgtacagcatcggttttttgaggaattcctccgcagtttccggttctctcagaagccgcataccggttcttttatcccgaagcgatatgacatttgatccccactccggcacaatgatgcattcagcctgatcagtctccgcctttatggctgaaactcctaaataagtcgtatgttcaatcgtcataagcacctgccctttccttgttttctagcatgtataggaattccattttctaaactcattttccttctctaaaaaaaacatcgcccgtatgaactgagcgatgtgcggtaaaaccttattgaatcagccgggtaatctgttttttcttccatacaaaccggtaatatccgtattgcagcagcaggctgacgacaaaagccgccggataaccgacccaaatgccgagaatgccgagattcgtataatgagaaagaataaaggccacaggcacttcaattccccaaatcgtaaaaatgctgataatcgtcggccataacaccgtaccgctcgcccgcattgttgctgaaacaatctgagcgtgaccgaaaatcagatagctccaaagggtaatcataatcagattgcgggcaatgcggagtgtatcctgatcggttaaaaacaaagccagtatctgccgggagaaggtgtaaatcagcacaatcaaaaccccgccgatcaaataattcaggccgatgccgactttgatgacctgcttcagccggccgaattgattggcgccaatggattgggcggcaaaaattgaaacggcgataccgaggcttaccgccggcatctgcacataactcgccacttggttgacgaccccgtaagcagccgtcgcgtttgatccgtaatgattgacaaatgaaatgaccgcaatttcagaaagtgatacgagaatcatattgatgcttgacggaataccgagacggagtaaaagcgcgagcagctttttgtccattttaagagaacggagcgcagtccggtcaaatgccaatggatgtttccttttccgcaaataaaccatgagtacgataaatgtcacgatgtttgaaatcacggttgcatacgccgaaccgtaaatgccgaacttcggaagtccgaaaagcccgagaatcaataagggcaagagaccgatgtttatgactgtactgacgattaacgtataaaacggagtctttgaatctcccgttccgcgtaaaaatgtcgtatacgcaaaatataaaaacatcagcggcattgcgcaaaacaaaatacgcgcatatcggacactgacatctattacgttttccggcgttcccatcagccgcagaatatcaagcgtaaacacactgccgacaactgccagaacaacaccgagcataaaggtaaaagtcagtgtagtgccgacaatcgccttcatcctctcttcgtttttcgcgccgtaagcctgcccgatcagaatggaacttcccgaaccgattccgatcgtaaaggagatcagcagaaaaaacagcggaaaaaaagacgatacggcggcaagcgcatcaactccgagccaccttccgacaaataccattccgaccaattggccgacagattgcaatacattgcttaaaagcagcggcactaaaaacagtgacatcgatcgccagacagactggccgcggccttccgctgtttctaaatgatcttgtacttccatatgtaggactccttttttgattttcttccattttattattcagcagacagcttgtaaaaaccttttgttcaatgaaactctttatcttattctcacgtcttacatggaaataaaccataaaaataaaaagtccggaaaatatttctgaaaaggtattgtaatcttatcgtaattattgtaacatttgtaacataagagaaagagattgattgaaggagagattatatcatgaaaaaatggctattattcctcactactattacattgattctgtcattgggcactgcggcgaccgcaaaaaatgcacctaatgaccttacacaaaaacaagcacttcagctggccctgtcagcgagagaacatttctggaacacgatgagcggcggtgcgcttaaatcaaacgcaaactgcacatctgaaccgtttgaatatcaaaatcttcaatacgtctttatgtgcaaagacctcggaacaaaagcgaaagccgtaaaatatctgacacccgcttttacaaagcaagcgattgacaaagggctcaaagattaccacttcactgtaaaagacggcaaattggctgttccgctcggcgacggagataacctcctgaattggaaaaaagcaaaaatgactcttctttctaaaaaaggaagcgttcaaacataccgcttcactgtaccgactcttgacggttcaccgtcagcaaaacgcgatgtaacattcgtaaaagaaaacaacgtttggaaagtcaatcaatttgatgctgtcatataagaaaaagcccgcttgcttacagcgggcttttttcacatcatttccaccaggttcttgcaaaatattaaactcaaaaaccccttgtataacaaggggttttctgtcttgccgacattattaatccgcacctatcttatgtcgaaaacgctctaggagagattcgaactcccgacctgcagtttaggaaactgctgcactatccgctgtgctactagagcctgcttctattatagtaacgctggcggccgtttttttcaagcctacagccctccgaacactttataggcggctctcgtcgtatcttcatctattccgatataacgcattgtaatagacggagaagaatgattcaaaatcctctgcagttcagcaatgtcttttgtcctctgataaaaatgatacccgaacgtctttctaagcgtatgcgtcccgatttcctccaatccgcacgcggcagctgcttcctttaatattctgtatgcctgaatccgggaaatgggcttattcgtccgtttcgatttaaacaaatagtcatcctctttcatgtcttttgtataagcgtatatgtcggccttcaaagactccagtatcagaatttttcttttctttctcgttttgctttcggttgcccacacatggtctttgttccttacatccctcacgcgaagcggcagaacatcagaaatccgcagtgcgctgttcatgccgaaaataaataaaaaataatcacgatcacttttcttcattaaatactgtttgacttcctggatcttctccaaacttcggatcggctgtacgatatgcatcaaaaaaccccttataattggtaaagtaacatattgagcattatgttactattatagccgaaacctgttgaatgataaaggataaagggccttatgtaacataatatacatagtgttacataaggggaataaggcacgcagtttcatcgaagtcttcaaaacatcattttcgacccgatgacgggattttaaatcaacagagactcacggtattaaaaaagaaaaacaacgcccttaaaacgaaatctgagcattcgtttttttgtgagcaaccgaaaaaaatgaaaaaaaaagacacaatatgaaattgtgtcctagtcttcatcttttacatcaatgtcttcaggaagcggctcatttaaaaactcttgaatcatttccttatatttttccagctgttcgagatgggtttgaaattgttccttgttgattaaatattgctgtccgtcatgtacggcccttattttattcgtcaaaacaagattgtgcacatattcttcaggaagactggtaaactcagctgtctctttgatcgttaaatacatggctcacgttcctttcatatgtcatgtgagtgaattctgttttgtttattgtagcttattttttgtctttatgcttgtttcacagctttttctgcccggtttcccatttagcctatttgcgactgattacattcacacagaaactccggctttttgcgcaccggactattccgtttgtcacttgtgaaaacagcacattttacttactctataattgtaagcggaaaacaaaggaggcagactatgaaaaagaaaaagtttatgaatctctgttttatcgttctgctcagtactttgctcacggccggaagcatcccttatcacgctcaggctaagaaacacccgttttcctatgacgactacaaacaggtagatgtcggcaaagacggcatggttgccaccgcccatcctctcgcttcacaaatcggtgccgacgtgctgaaaaaaggaggcaatgcaattgacgccgcggtcgccattcaattcgcattaaacgtaactgaacctatgatgtcgggaatcggcggcggcggatttatgatggtttatgatgcgaagacgaaagacaccaccattatcgacagccgggaacgcgcaccggcaggcgcagcaccggatatgttccttgacgaaaacggcaaagccatccctttctccgaacgcgttactaaagggactgcagtcggtgttccgggaacattaaaaggacttgaaaaagcgctcgacaaatggggcacacgctccatgaaacaactcatcaccccttccattaaacttgcctcaaaaggctttccgatcgattcggttttagctgatgccatctcagattataaaaacaaattatcacacaccgctgcaaaagacgtgtttcttccggacggagaacctctgaaagaaggagacacactcatccaaaaagacttagccaaaacatttacagctattaagtacaaaggcacaaaagcattctatgacggtgcattctccaaaaagcttgcggaaacagtgcaggaattcggcggctcaatgacagaaaaagatatcaaaaacttcaatgtgacgattgacgaaccgatctggggggattaccagggctatcatatcgcaactgctcctcctccaagctcgggcggtgttttcctgttgcaaatgctgaaccttctggatgattttaagctttctcaatatgatatccgttcttggcaaaaatatcagcttctcgcagaaacgatgcatttggcttatgctgaccgcgccgcatttgccggggatccagaattcgtcaacgtccctctcaaaggcctcttgaatccagattatatcaatgcccgcagacagctgatagatattgataaagtcaataaaaaaccgaaagccggcgacccttgggcctatcaggaaggttctgcaaactataaacaagtgaagcagccgactgacaaacaagaaggccaaacgacccacttcacggtaaccgaccgcttcggcaatgtcgtatcttatacgacaacgattgaacagctgttcggttccggcattatggttcccggatacggcgttgtgttgaataatgagttaacagacttcgatgcggtgcctggcggcgcaaatgaagtgcagccgaataaacgtccgctcagcagcatgactccgactattttattcaaaaataacgaacctgtcctgactgtcggctctcccggcggagcaacgattatttcttccgtcctgcaaacgatcctgaacaaagtcgagtacggcatggatctgaaagcggcggtcgaagagccgagaatttacacaaacagcatgacatcctatagatatgaaaaaggagtgccggaagaagcccgcacaaaactgaacgaaatggggcataaattcggcagcagcccggttgatatcggtaatgtgcaaagcatcctgatcgatcgtgaaaacggcacctttaccggagttgccgactcaagccgaaacggagccgcaatcggcgtaaacttgaaacaatataaaaaataactaggcaaaaagcctcgtttctcaagctgagaaatgaggcttttgtttattctgcactgtattcagatgagggtttttcagatgttaacgaggcaagtgaaagcacgccgcacatcgcgatgacaacacccgctgatccgatccatgtcactgacgcaagagacagatgagtgacaacaatgcccccgatgcccgccccggccgccatagccagctgcatcacagactggttgaggccaagtaatacacccgatgattcaggctccatcgttgccaaatgatactgctgagcaggtcctgatgaccaggcggcgaaggaccaaaaaataagcactgccgccgctccgaaagcagaatgtgtgacaaacggcaataacatgagcatgatagcatgaagcgccattccgccggttaatgtcatacgcgcccccatttgtcagcactgaaaccgcctgctttagaaccggcaagactagcaacaccgaaaataagcagcaatgtactcagtattccgctgccgatatgagtgacgttcagtaaatacggagaaaggtacgtatacgcaaccgaatagcctccgagccaaaaaaacgtaatagcaagcccgacagccacctttcgtttcttcaaaagagaaaattgctgaataagcggcaccggtttatctccttttatctcaggcaacgcaaaacgtataataagcatggcaatgattccgattgccgcaattccggcgaaaaccaccttccagccaaaagcttcagacacggttcttccgatcggaacaccgataatgagcgccgccgtaaaccccataatgacggtcgcgagagaacttgcctgttttcccgggggagcgatttttgctgcgatcgtaagcgcggtgaccaccacagttcctgctccaagcgccatgatcacccgggctgccgcaaataagccgtatccctgtacaagaaatgaaatgatatttccgattacaaacaatccaagagcatagatcatgagcttccttctgtccagttttgctgtaagggccatcatgacaggcgttccgattgcataaacaagtgaaaaaatcgtaatcagctgccctgctgctgccacagtaactcccaaggaacctgcaattttatcaagcatcccggatatcacatattcagacgtccccactaaaaagctgataattgccaaaatgtaaatcttccaggtattttgcacctgacacactccttcattgataatttatataaagatatattgtgatatatcgatataaagaattgaacaaacagaaacaaatcgcaatatgtcgatgtgtagtcgaaaaaagaaactgaatccctcttctaaaggattcagccctacatttcgcgctgaaaataatcggccatcgcctttatcgcatcttcatctcttttataataggtgtatttgccaatccgttttgtttggataaggcctgcgcgctgaagaatggaaagatattgagacgccgttgactgtgtcatctgaagcttatcggtgatctggctgacacatactccgatctcattcatatcaatgccatcatgcggtgcgaagtgacggtccggctctttcagccattgtaaaatctcaagccgtgactcattagacaacgctttaaaaacatcaataggtttcatacgctttattatatcgtgattttgcgatatgtcaatgttatttttcttgaatctctattttttgttttgtctctcttatgatccgggaaataaaatcactcacattctcttcaaatgtgttttcccgcccgtattgccttacatgtacagaatggtggcggcactcttgatctcccacaaccgccatatacggtatttttttcatttgtgcttctctgattttatagccgagtttttcatcacgctgatcgagctcagcccggatacccgctttctttttgagaaaaaccggaacgaaaaaaaattggcgtacacagctgtcctgttttctcatcttctgttcgataatgtttttaatccattcagcagttcttcaaacgccgatgttaaaaataaatcactccggtagatgaatgatatattcatattccgaaaatgttcaggaagctcatgaagaaaaagatttttcctgttttgaaaataacggacggctgatgcaggcagaaaggagacccccatccccgcctgcaccgccccaataatggcttccaacgtaccgaattcaatgattttatgtgcgggcactgcctcttctttcagtatgttttttattttgcggcggtgcgaacagcccgcggcaaaatacagaatcggctctcgcagcaagtcttgcaaactgccttcccgcttatttgaaaccaagaccaattcttcttgaaatacagcgacttgctcaagatcttcatattcgaccggtccgtaaacaaaagcgccgtccagctcatagtgtagaacgcgctgcactaaggtatgtgtatcaccggttgacagagacagctgtactttcgggtagcggctgcaatactccgtgaaaaattgagggagatggacggctgccgccgtttcaagagaaccgattcgaagcgggccgttcggatcgcctgcctctcgcgctgttttttgcgcctcatgcagcaattgaaggattctgtctgcgtcttttaataagttttcacctgttggcgtcagcgtcattccccgatttgtgcggtaaaaaagctgtgtttgcaattgccgttccagctgctgaatccggtttgtcacatttgattgaacataatgcaggctttctgccgcctttgaaatacttcctttgcgggcgacagcctgaaaaatctttaagtctccgctttccatctaagggcaccttcttgctatgatttttattgatagccggctatcaattttcatttatttactgcagctgatacagcctgtaaaatttttctcatcaatcataaaggagagaagaatcatgaatgtccttatcatacacgaaaatggctttaatttcaggcaggcacctgacaaaaggccgggaaacggcgaagtaaaaataaagctgaaaacagccggattaaaccatcgtgatttgtttttaatgaaaaaacacgaaaccggaaaccatgaatttattctcggttcagacggcgcgggaatcgtaaccgaaataggacacggcgtccggtctcatttactgaatgcagaagtcatcatcaacccggtactgaattggaagactgttgaggacgtaccagccgtccctgatattttaggcggtccgagcgacggaacattttcaccttatgtcatcgttcctgcggaaaatgccgttttaaaacccgaacacctgacttgggaggaagcgggcgtcctgccgttatcagcattaaccgcttatcgcgccttatttacaaaaggacaattaaaaaaaggcgaacaccttatccttccgggcatcggaagcggcgtggcaacatatgccttattaatggcaaaagctatcggagcgacagtcagcgtcacctcccgcagtgaaaacaaaaaacaaaccgcactgtcatacggtgcagaccgggcgattgacagctacggtgactggaatgaggcgctgaatggcgaaaaagcagatatcatacttgacggtgtaggccccgctttatatcaacactatcttgacattattaaaccgaatggccggatcgtaacattcggcgccagttcaggcgatcagctcggatttcccattcgctcgctgttttttccgcagattcatattctcggtacatcaatgggaagcaatgaggaattcgcggatatgctggaattgataaaccgctgcgagctccgtcccattatcgaccgcatgtaccctctcagtgaagcagctcccgcttttaacagaatgcgggaaggacggcagttcggcaatatcggctttcgtatagatgtctaaaaaaaggaacggacccgtccgttcccttatttgtttttaagcgtttccgcttgaaattcaatatgtttttcttcatcgattaaaatctgcccgcaaatcgactgcagacacacagagcccgtcatgttttttaaggcgtcattttaaacggcagcgatgacttccgccgtcagcagcaccctgatcgattgcgcaaggcttgcaaatcgtatcagtctgcggaaaaaaacaatctctccgctctgtaaaacaaaattccatatttatcctccatttccacattacctttatatgaccaatacaagaagaaggaggttccatttcaatacgaaaaaccggctgatcccagccggttttataaataaacccctttatttacggtaaaacagtgctccccattaaataactgtcgacttcgcgcgctgcttcccggccttcattaatcgcccatacaatcaggctttggccccttctcgcatcccctgcggcgaaaacaccgtcaacattcgttttataatccccatatgccgcctgaattttatgatttgccgaatcgactccgaactgtttcaataatggctgttctgtcccttcaaaaccgatggcgatgaacaccagctgagcaggccagactttttctgtaccgggcagttcatgaaattcatactttccgaattcgtttctgactttttccatttgaatggtgtggatctcttgtaagcggccctgcttatcggccaccatttttgtcgtttgaattgaatattctctcgggtctttgccgaactttgcctgcgcttcttcataggcgtattcaagggtaaagacgtgcggctgttcaggccacatattgtcgttcgtgcgcgtctgaggaagtttaggatgtttcccgaactggtgcacgctgcgcgctttttgacgcagcgcggttgccacgcagtcagctcctgtgtctcctccgccgatcacgatgacatctttccctttagcgtctataaattgtttgtctttgaagttggaatctaaatagcttttcgtcgccagtgttaaatagtccatcgcataatggacgccttttgcttcccggccttcaatcagcagattgcgctgcttttgggcgcctgtgcacaaaatgacggcatcaaattgttctttcagctcatctgccgttatatcaacgccgatttcggtatttgtcacaaaatctataccttcctgcgtcaaaagcttaatacggcgttcgacgacatttttctcaagcttcatgctcggaatgccgtacatcagcaggccgccggctctgtcggcacgctcgtagaccgttacggaatgaccggcttgattcagctgatcagcgcttgccagacctgccgggcctgaaccgacgacagcgacttttttacctgtgcgtttcgcgggaattctcggctgaatccatccattttcaaaacctttgtcaatgatcgtccgctcgatgtttttaattgaaacagccggatctgaaatggccagcgtacaagatccttcacaaggagcgggacagacccgccctgtgaattcaggaaagttattcgttttcagaaggcgctccaaggcttctttccagcgcccccgatagacgaggtcattccactccggtatcagattataaatcgggcatccggaggtaaaaccgttgatatcagcgccgatttggcaaaacggtgtgccgcaatccatacaccgcgccccctgccgctttgacgcttcatctgaaaatggagccgaatactctttccaatcctttaagcgagtgagagggtcccgctcagccggtttttctcgtttttcttccatgaatccagttggtttccccatgttcctctcccctttcttactgtactaccgcttgtttttgatctttggcaggcgtttgctgaacctttgtattggcttcaaaagcatacataattgcgtcttcttctgataaacccgccgctttttgttcttcgatgctgaggagcatttgtttatagtttttcggaatgactttgataaaggtttctgcggctttttcccaattgtccaggagatttgcggcttttttgctgtttgtcagcgccgcatgccgtttgaccatttcttgcacttctttgatctccgcctcatccgtcagcttttcaaatgaaatcatttccatgttgcatttgcgtttaaatgctttggcatcttcactcaggacgtatgcgataccgcctgacattcccgccccgaagtttttgccgacttcgccgaggacgacaacccggccgcctgtcatgtattcgcagccgtggtctccgataccttctacaacgacattgactccgctgttacggactgcaaaacgttcaccggcgcgcccgttaatgtacgcttccccgcttgttgctccgtaaaatgcgacgttcccgataataacgttatcgtgtgtttcataattgaaggcatcaggcgctttcacgatgatttttccgcctgaaagccctttgcctacgtagtcatttgaatccccgttcaaatgaagcgtcatccctttagggacaaatgcaccgaaactctgtccggctgatccggtaaaatgaagtctgatcgtatcatccggcaggccttccgctccgtagcgtttagaaatttcacttcccgtcacggttccggctacgcggtttgtattattgatcttgatttcagcttccgcttcctgaccggcttcaattgcagcctgcaccgccggaagaataaccgtcatatcaagcgactcgtcgattttatggttttgcgccgtacggaaagtgcgtatgccttcaggctggtacagcagtgtggataaatcaagctggcccgctttccaatgcgctttcgcacgttcactgacatgaagaacgtctgtccgtccgatcatttcatcaagcgtcttaaagcctaactgcgccatatattcacgcacttcttctgcgacaaacagcatgtaatttacgatatggtcaggattgcccatgaattttttgcggagctccggattttgcgtcgcgacacctacaggacatgtatctaaatggcaggcgcgcatcatgatgcagccaagaacgacaagcggcgctgtagcaaagccgaattcctccgcaccgagcaaggcggccatcacgacatctcggcctgtcatcagcttaccgtccgtttccaataccacgcgatcccgtaaaccgttcagcatcagcgtttggtgagcttctgcaagaccaagctcccacggaagaccggtatgtttaatactcgttttcggcgatgcgcccgttccgccatcgtagccgctgatgacgatgacatccgcagtgccttttgccacaccggccgcaatcgtgccgacaccggcttttgacacgagcttgacgctgattcgcgcgcttcgatttgcatttttcaaatcatggatcagctgcgccaaatcttcaattgaataaatatcatggtgaggaggcggtgagatcagccctacacctggtgtagaaccgcggacatccgcgacccaaggatatactttgttccccggaagctgaccgccttctcccggcttcgctccttgcgccattttgatctgcaattcatccgcattgacgagataatggctctttacgccgaaacggccggaggcgatctgtttaatcgcacttcttctgtcgtcgccattttcatccggaacgaaacgtttcgggtcctcgccgccttctccgctgttgctttttccgccaagcctgttcatcgctatcgctaaagcctcatgggcttccttgcttaatgaaccgaatgacatcgctcctgttttaaaacgtttcacgatggacgcagctgattcaacttcctctaattttaaaggcttgcggtcttctttgaaggcgaacagattgcgtaaaaatccgattcgttcttcatccgctgcatgagaatactgcttaaacaagctgtaatcattttttcggcaggcccattgcagcgtatggatggttttcgggttgaaagcgtggtgctctcccccgttccgccattggaattcacttccaggatcaagagtttggctgtaatcatccttgtacgccgcttgatggcgctgtttcgcttcttgcgcaatcgtctcgatatcgattccgccaagctgagatgcagtaccggtaaagtatttggcgataacgtcttcaccgatgccgaccgcttcaaaaatttgggcgcccctgtaactttgcacagttgaaatccccatttttgacatcactttcacgacgccttctgttacgctctttccgtatttgctgacagcttcttcatacggaatatcaagccggccttcatcgatttcctgcttatacgtagcataagtcaaatacggattgacagcatcggcaccatacccgatgagagccgcaaagtgatgaacttcacgcgcttccccggattcaacgataatgcttgcttttgttcgcaggccttgacggatcaaatgctgatgcagcgcactgacggccaaaagcggcggaatcggcgtcaattccttactcattgccctgtcagataaaattaacagagatacgccttccttgatcgctttttccgcttgctgaaacaaatccttcaggcctttttccaggtcatcggaaaacagcgtgcggatgttctggctcttaatatcagggtgcacaagtgttttcagcgcataaaactgttcgtttgataatacaggagtatacaattttatgcggcgtgcatttctttcactcggatgcagcagatcaccttcagccccaagccatgtcaccgtagaggtcacaagctgctcgcggatcgcgtcaatcggcgggtttgtgacttgcgcaaacagctgtttaaagtaatgaaacagtgattgggcgcgatcggataaaacggcgagcggcgaatcatttcccatagagccgagcgggtccttgccttctttaataacaggaattaaatatttctggatatcttcatacgtatagccaaacgctttttgacggacgagaagatcatcgaattgttcctcttcccggatttccgggtcaggattcacttgaaccaattcttcttcaagccatttttgatacgggaattcattggcgatttctgtttttacttcttcatctgaaataatccggccttcctctaagtcaatgagcagcatttttccgggctccagacgttttttatgaagaatgttcttctgctccacttcaataacgccgacctcagatgagaaaataatatggtcatcttttgtcacatagtaacgtgccggacgcaggccgttacggtcaaggatggcgccgatttgttttccgtccgtaaacgaaatggcggtcggcccgtcccacggctccattaaagagctgtgatattcataaaaagcccgtttcgctttagacatgtgagtgttttccgtccatggttccggaatcagcatcattgccgtatgtgccggtttccgccccgccatcacgaaaaattcaaacgcattatcaagaatggatgagtcactgccctcagcatttaaaatcggcagcactttgtgaagatcgtctccgaagctttctgaaacgaactgctgctccctcgctctcatccaattgatgttgccccggagcgtattgatttctccgttatgaatcagatagcggttcggatgggcacgttcccaagtaggaaaggtatttgtgctgaatcttgaatgcacgagtgaaaatgcagatacgaaggtttcatcctgcaaatccaaataaaaagcgtcaacctgctcaggcgttaacaaccctttataaacaatagtctggcttgacaggcttgcgaagtaaaaatcaagctgttcttgaacgccccaattttcagcctgcttccggataacatacaatttgcgttcaaaagcaaggctgtctttcaaatcgtttgcggctccgataaatacttgacgcacatacgggcaagtgctttgtgccactgttccgatttttccgacatttacagggacggttctccagccgagaacgatctgtccttcctgctcaatgaatgcattcacctgtttttcgatcttttttctttcctcttcattttgcgagaaaaagaccattcctaccccgtaacggcctttttccggcagcttcatttctccgcactctttcttaaaaaaagcatcagggatctgaaccatcaggccggcgccgtcacccgtattcggatcactgccctgtcctcctctgtgatccagctggcaaagcatcttcagtccttttttgacaatgtcatgtgaaggtttcccttttaaatgggcatacaagccgattccgcatgcatcgtgctcaaattccggacggtagagaccttgtgctttcggcatttgattgtaagtcataattcctctcccccgatcagtttccgttaattatcggtcataaaatctgacaactttaaattaattgtaagttttcaaaacaatataaacaatatataatttagatcaaatacatctcaaaatgagatagatgggtgtgaacgcaatggaattacgccagcttcggtattttatggaggtagcagaacgggaacatgtgtcagaagcggctgatcatctgcatgtcgcacaatccgccatcagccggcagattgcaaatcttgaagaagagctgaaagtcactttatttgaacgggaaggcagaaatattaaattaacgccgatcggcaaacaatttttagaacatgttaaaacggcgatgaaagcaattgattatgcgaaggaacaaattgatgaatatcttgatccgaatcgcggaaccgtcaaaataggatttccgacgagccttgcaagccagcttttgccgactgtgatttcggcatttaaagaggaatacccgaacgttgagtttttgctccgccagggttcttataagtttttaatcgaagcggtaagaaacagggatatagatgctgcgctgctcggccccgttccgacggaattccccgacataacaggcaatatcttattcacggaaaagatttacgcgcttgttccgctgcatcatccgcttgccaaacagaaaaatattcatttaattgatctgcgcggggaccaattcgttttatttcctgaagggtttattctccgaaacatggcgattgacgcttgcagacaggccggctttgcgccgcttgtatcgacggaaggcgaggatttagatgccattaaaggattagtctccgcggggatgggagttactttattgcctgaaagcacctttgcagaaaccacaccccggttcacggtcaaaattccgattgaatttcctcaagtgaagcggaccgtaggcattattaaaccaaaaggaagagaactggctccgtctgcaaatgatttctatcattttgtcattcaatttttctccaaacttgaacaatatcaataaaaaacaaacccgagcttcaaaacgaagcctcgggctttttcatatttttatagatctttctcagccgatcggaatggatagttcaacgtggcagacaaacgcttccggatcaatgactgattgatcggtctgtttgtgaggcgtttctttaaatgtcttcagctgggctgaggaatagttgacgatgccgagtccgagctcttctccctgctgatcaagcagcctgacaaccgctccgctgctgaatctgcccttaatctgttcgatatcctgcggtgacagcgccatatttccgtttgcgacatcgcggctgcttttcttttccatcacaatttcgccttcggggccggaattaaatgcaagccattgttctttgtggtttaacggcagggttccttccgcttcaaaataagttccttcagccgcctcatctaccgcttgaagcagaatgtccggaatgttagcctgcccgagaaagcctttaataccggaggccatcacaatcttaaaagcatccagtttcgaacgcattccgccggttcccatttcactcccggcatctcccgcgcttgcttctatttccggagtgatgtcacttacatgtctgattcttttcgctttcgggttgctgcgcggattatcatcatataaaccgtcaatgtctgataaaattacaagcatgtcggcatcaattaaacctgccaccttcgctgcaagtgtatcgttatctccgaatttcagccggttgactgtgaccgtgtcattttcattaataatcggaataatgccccgttccaaaaggacgttcatcgtattgcgcacattatggtagcggtattcatcggaaaaatcgcttcttgtaattaatatttgtgatgcgacataaccgtgcgctaaaaacagctttgagtaagcctccattaataatccctgcccgatggaagcagaagcctgtttttcagggaggccttccggtttctgaataaatccgagcttccgataacctgccgccactgcgccggaagatattaaaatcacttcatagccgctgtccttcagctgtgcgatttgatccaccaatgcttccagctttcttctgctgatttccccgtgcaggctcgtcagtgagctgcttccgattttcaccgcgactcttttgatcttcgtccgagacgtcactgtatcactcctgttttttaacgattatagtgctgccgttttttcaattgttttgctgatctcaatagaacgttcggtcgcgtgtttaatggctttggcaatggcttctccgccgccttctgacctgagcgcatcgaggccggcttccgtcgtgccgtttggagaggtgatgttttcccgaagcacatccggtttttcacccgtttccatcagcatttttgcagcgcccaataacgtttgcgccccgattttgcgggacagccgtttgtctaagccggcttcttcacctgctttttcaataaactccattaaataataaaagtacgccggtccgctgcctgcgatgccggtgaaaatgtccatctgatcttccttgatcacgtacacttccccgaggcattccaaaagagataccgcggtttttgctgaaccgtaagagacatggtctccgaaagccgcagctgttgccgattcgccgatcatgctggatgtgttcggcatcactcttacaactggctgacggtcatgtaatgattgttgtataaatgaggttgttatgcctgccagaacagacaggatgatttgatgaggttgaatacgccgtttcagcgtagcaagagcgatttcagcatccttcggtttcatggctaaaataaagacatcaatgtcttcggttttcatgctgtcaaaagcaatgccttgaattccgtattgatgttccaattcagcgagtcgctctgtattgcggcggtttgtcacgcagatgttttggttgggaattttttttgcgcggaccatgcctgatatcattccttcagccattgatcctgctccgataaaagcaactttcttttgatctaagatcggtaacatctcccttgttcgtattttgttcgtatttttcacacgttttttatgttaccacttcaggagtcgatgtcaagtttggaggttttattgatatgtattgttccgagcctgttattatgtataatgaatcacagaacaaaccttttgagcccgggaggccgggagcgttccggccggatttaaaaattatctgaaatggctttttctatcagctttttgcagcggtcaagctctgtcttcagctgttttttgtaaagctttgcagcttcatagtctttaaattgatagagaacgacttcctggagtttggctccctcttttttcacttttacttgctttaaaatcccgtcatccaaaagttcgtgaagtgaacggtacacctcggtatgattcggcttaaaaccgatgggtttaaattccgaacgcagcacctcgagaagcttcagtccgtaaagccgttcctgctctgtcattgtaatcatgtaaagctttaaaaaggctctttgttttactaaaaaaccggttgaacttcttttttcttctttcaatatgtgcccacccttccttctaacaaattattccatgtactaaatattctctttatatcccgttttcccttttattgttcggacagtttggtttatattgatttgttttttggatgcggggaaaaataatcttattgaacatttggtacatagtttatttagtttaattatagctgatatcggtttctttttcactcttttttctgcaaaaacggatctttatgcctatttaatcgggttgcgaaaacaaaaaagacccgtcacaaagacaggtccccttttgattaaggattagttgaccacaaaccggcagttttgatgaaaatgcgcgggtgtaatttcaattgagcaaccatatattctgcaagatcctcaggctgcatgactttttccggattgccgtctgtcagatttaattcaatagacatgtcgcttgcaaccgtgctcggagtcattgcgctgacacggatattgtgttttctgacttcctgcatgagagattcggtcagaccgagaacggcaaatttagaagcgctgtacgcacttgtcgccgcggcgcctctttggcccgccgtagaagaaatattaatgatatctcctgattttctctcaatcatttcaggaagaacggcgcgtgtcacgtggtatacacccattacattaacttgaatgatgtcttcccactcttgaggcgtaagatccaaaaatccgccgaatttgctgattccggcattgttaatcaggatgtcaacctcaccgagttcttctttaatagaagagacggcttgttcaacctctttttggttttttacatcggcagcagcgaatgatgcctttacaccaagggctttcacttcttccgcaaccttttcgacatttgcttctgtacggccgattaaaccgatattgactccttctttggctaaagcgatagcggcggcgcggccgattcctctgcccgcacccgtgataagagccgttttgttttgtaagctttccatgtctttcaccctttctgaatgtccttatgtacgatttcacattataagcagaaaaaaaacaattagcaaataaaatgattcagcacgatccgtaaagggtatcaactgaaaaaaaggagtgaaaagcagatgatcatcattttgtatatcagtgctgccgttgcggctgccgctttaatttatgcagccgtatccgccgtgcattttaaaagaaacacagcgcctgatataaagaagattaacgccgtgacagcgtccatgcagacgtccgttgaagaaatcaaaacagaaacccgtttgttatcacaaaagcagaaagaactgcaggaagactttcttactaaaaaaacagccgtgcaaacgacggcagccgaagttaaaggaacgcctcacgtcctgaaaatgctctggaacgccggtaaaagcggtttatgagcctgcatgtcatccgacgtttttgatgacactaagagaaactggcggattcaaggaggcataacatgatttgcgatcgtgagcggcttgcgcattttttgcagcagcttaaagcattatcatcttcgggaggatttacaaaatcggatttgctgacttcggagttccatttagccaaggacggagatctggatatgtattattcgcctcataatgagtatatcaacccacatgctgcggttgtcatctccggaattacacccggtttttttcagatgcagcgggcgtacaaagcagcggcacagcttttaaaaaacggcgaatctcttgaggtgatagcatatgagacaaaaaaagcggccggactttccggttccatgaggcagcacatcatcgaaatgcttaatgaatgcggtctgccggccgcgcttcacgttgaggattcatcccggttttttgattcaaaaagggagctgcttcatacgacatccgttatcaaacaccctgttttttataaacagaaaaactatacgggacaccggccggccatcagcagatcagctcttctcagccgttacgcgctgacatgttttccggatgaaatagaaatgatgaaaaaagacattctgcttatccctctcggaaaagcagcagaatcagcctgccgcacgctgaagaagaaccgcagaatgggccatgcggtcattctggaaggcttcccgcatccgtccggagcaaacggacatcgtttcaaacaatttcacgaaaacaaacaatcgttacgtgaacaaattcagcggtttgccgggtttcttcatcagccgtaaaaaaacgccccgaattttcggggcgctgctgttaagaagcgtattcaggcaatgctttattgtgttttgccgttttctcttcaggtattttgatttgatttgtcaagatcgcacttacgaaatagagcgctgcgaaaatccatacaacgccttgtgcgccgacaagcccgatgaacgcccaggcaagcgcggggccgacaaatgccgacaggcccgcagccagatttaacacagacatagcagcacctttattgctgccggccgccgtcggcacgatagccccgatcggaacgaacccggcgaggagccctccccatataaaaccgacaatgctgacgaacagcaaattcccatgtgatacaacaggagcataatataataaaagagtaaaaatgccgcagcccactcctccgaaccacatgacagtctttttccagccgaaggcatcgccgactgcgccgaagattaagttaaagacgatatttccgagaaaaatcgttccccaaatttgcagccatacatttgtagaaatgccgtgctgcgccatatgcatcgggaggaataccggaaatccgtatgttccgatgctgttaatgattcgaatgatcccccagagagcacgcgcggattttcagcaaggatggtgattcccttcattaattcctgcgccttttcccgcttatctgcctttttcttttcaaagcggtccctatttaaaatcaaagcaaaaaacgcgccgagacatacccagaaaattgaactccacagcgtattcaaatagccgaaggatttgatggcccagcttgaataccaagcaccgaatacaaacatcccgcagcaatatgcaatccagaaccagccgaccgccgtactgagcctgtttttcggcgaccggtaaatcacccatgtcaaaaatgaataggcaaacagcgggtaacccagccctttaataaaatacgtgacatacatcaccggcaaattaagattctcaaatccgtatgcgataaacgcggctgttccgatgacgtaaaacaacagccccataaacatcgtccgctttgcgccgaaggcttcgaggcagactcctgaaaaccacgacgccacagcaagagaaataccgtaaaccgtaaacaaggatgctgattgctgtaccgtcaagccgttttcgactaaaaacgggctgagccagccttgttcaaggccgtcccccatcataaacagcacgacccctaaaaatccccaggcgagctgtttcggaattcctattttattaagcatttttgttcctcctcagcaatctttcatgttgtcatctcatccccaagtcaggctttcaccgccggctgaaaatgagtaaataatttttgggtatgtttccattcttcatataggaagagatccgtctgatccgcttccggctcaattacctttgtgcaggtcgaaagctctgctttcacaccgagagcttcgttgcaaatcatcaccgctcccattgcggatgcctggctgaacccctctctcttatagattttcttttgaagaaggttagcaagaaactgcgtcaaagcatcactttggaaaccgccgccgcacaccttcacataatcttgtgaaaaggaagccgcctctgttaacgcctcatagttccatttgattgaaaaagcgatttccagcagtgcagctttgacaaaatgggctctgcttaagttttgggacagcggagcgtcaaaaataaatccgccttttgccagtgcgtttttctcaggagataaataggagcctaacgcagatatacaggcatgatcatgtttcggcagacttgcgatttcccgttccatgacgctgtaggattcattcggataaaaaatggattttaatttttgataattgagtcctgttacacccggattcgtttcaagaagccattcaccttcttctgtatggcaattcagccatgcattctctaaactttcggttccggtctccgctgttatctttgtaatcggcgtcgtcgtgccggatacaatgacgatatctcccggctttgcatctgcacttttgatggcaagctgtgtgtctcccccgcctgcaatcacaggcactctttcagaaagaccgagcaccgccgctttcttaaacgttaacattccgacaaccgtcccagatcggacgagtgaaggaagaatggcagaaggcacaccgaagatgttgcataatttctctgaccacgcctttttccttacgtcaaacagcagtgtttcagcagcctgtgacggttcatagcttaaaattccgctcagctcaaatgtcacccagtcactgatgcttgtgatgcacttcacttctttccataaagacggctgtctggcttttaatccgacaagtttcatggcggaaaataaagcgctcggaagacgtccggtttgctgatgcacttcttctgcctcaattccgccttcccattcacgccctctgttatcaatgttgggcagaccgagaaatgcctttttatctttattgatcaaaacgattccctgcctctggcttgttgaggtgattccgattaatgtaatatgagggctcttggcaatagcctttcttgccatagcgctgatttgcgtccataacccttccggtgagaaatatcgtccgtccggataaagcggatccgtcacatattcaatgtcttccctttcaagcgcggtcacttcgccgccggcagtcacgaccgcgactcgcgcattcccagtcccgatgtcaaatacaaggtagcctttttgttcagccattacagcctcctccttccgtttcaagttctcttttgttataaagttcacgtattgaataggtttgatcttgtttccatttgaaaagcgcttcatttaaaatcttcacatgatgatcttccacttcaaatgttgcgcccgctaaatggggagtcgcgaacacattcggcaaagagatcaaatcataatcagaagattcaggcggttcgtgataaaacacgtcaaggatcgctcccttaatccgccgttctttcagcacccgcagcagctcttccctgtctgtaaccgccgctcttgacgtattgacaaaaacagcttcctgtttcatcaattgaaagtgccgggcgccgataaggccgatggtttcttctgtgcgcggcaagtgaacggaaacaatatcactttcagaaaatacccgttcaatcgtcgttttttcatactcccggttttcatgacggacaaatggatcatagtaaagcaccttgcagtcaaaagcggccaatagcctggcgattctctgtccgacagctccgaaaccgataaggccgactgttttccccgtcagctcatttcctctgaatttgacgtaagcctgcaaataatcaccattccactttccgtccttcagccactgatgggaagaatacgtatgacgcaaaaatgaaatcacattcccgataaacatttcagcaacggcctgggcattgcgggccggtgtaaagaaaacggggatttttcttttagtcgccgccgcaatatccacattagacggcattcctctgcagacaccgataaaagcggaatccggcaatatgtcaataacacgctgagacacctcatcaagttcggttataagccccgacgcgtttgtctcttgaatcatccggatcaattcatcttcccgataggcccggccgtgcttcttccacggccggtgcacagtccggccgaacagctcagccagctccttcagcccctcgtcgtgatatggcgcggtaattaaaaccgtcatggtgcaaaacatccttttcacataaattttttcataaaaaaatctctttcctcaaagaaggaaagagattcatataccgtctttatacgcttgaagcgcacaaatatgtatagaccattctttcctatctttcaagcatacgcttgctggaattggcacaataaatgttgccgaggattcatagggccagtccctccacctctctggatagaaaataaaatgatgaaattgtcaggctgtttaaaagaataaactcatcatagaaaagtctttccgtaatgtcaacacttttttctgaattgacgttcgattttgaaatgttataatgcttacaatataaacaaagaggagaaatgggctatgaattctgctgcaacacagccgaacggggtctttaagtcggtgtgctcactagactgtcccgatcaatgcggcttgcttgtgacaaaaaaagacggaaaaatcgttaacattcagggagaccccgatcacccggtcacatcagggaatatttgcaacaaagtcagacacatggctgagcgtatttatgatgagaagcgcgtaaccgttccgttaaaaaggatcggtaaaaaaggtgaagccgcgtttgcgcctatttcctgggaggaagcaatcaatacgatcagttcgcgctggaaagagcttattgccgaagaaggagcggaaagcattcttccgtacagcttttacggcaatatgggaaaactggcggcagagggaatggaccgccgttttttccatcgtctcggagcgagtcatctcgaacggacgatctgcagcaaagccggttctgaaggctataactatacaatgggagaaggagcgggtactgatccggaggagaccatacatgctaagctctttattttttggggaatcaatgccgtcagcacgaatatgcaccaagtcatgattgctcaaaaagcccggaaaaaaggggctaagattgtcgttattgatgtacataagaaccaaaccggccggcttgctgattggtttattcccattcgtcccggcacagatgccgcactcgccctcggtatcatgcatgtcttattcgctgagaaccttcacgatgaagcatttctcacagaatacaccgaaggcagtgacgaattaaaagcgcatgtcaaacactatgatccggaaacggtttctgctattacaggcgttaaagccgacgatatcagacgccttgcgagaatgtacggggaaacctccccttcccttatcaggatcggaaacggcattcagcaccatgacaatggcggaatgatcgtccgcaccgtcgcctgccttccggctgttacaggacagtggctcaacaccggaggaggcgcaatcaagcacaacagcgcggtattaaactataacagacaagcgctccagcggcctgatctgctttacggccggaagccgcgatcatttaatatgaacaggctcggaagcgttcttttagaaacaaaaccgcccgtgcgctccctgtttatttacggtacgaatcccgcagtggttgcgccggaagcgaataaagtcagaaaaggcctgctgcgggaggatttatttacagtcgttcacgatctgtttttaacggaaaccgccaaatatgcggatatcgtgctccctgcttcatccgcttttgaaaacacggatttttacacgtcttactggcatcattttattcagctgcaaaaaccggtgatcgaaccctacggagacagcaaatcgaatacggaagtgttccgtctgcttgccggagcaatgggatttaccgagcaggagcttcaggattctgatgaagaattaatcagacaggcgctggactttcccgacaatccgtatatcgaggatattgattacgaagcgctctcaagccattccttcatgaaagccaaacggaaaaaaccgctttttccgggaaagctcaagacaccgagcggaagaattgaattatattcggaaaagatgaaacaggacggttatccggcgctgccgacacacatccctcttgagagcgatgacgattttccgcttttatttgtcccgggaccgaatcataattttttaaattcgacattttcaaataacgaaaaacacgtaaaactggaaaaagcgccaaaactttttattcatacagaagaggctgtacaccggaacatagaagacggagaaaccgttagagtttggaatcaccgcggagagtgcgaattgactgtttcggtcggcgaacaggtgcttcccggcgttgcggtgagccaaggtctttgggccgatatggatgataaaaaacagctcgtcaattcactcacgcccgatcggctggcggatatgggcggaggtgctgttttcttctccggaaaggtgcaggtggaaaagctcagcaatcaaaaccgtccgcaataaacgcccggcggttttgctgaaggctgaatcctccggccggcttcaccgtataaaaaatgataacgtttattggaggtttggatatattaccggcattggaatcgctttagccggatatttcatcggagacggattgaaaactttaactcacctgatcctcatgaatatctgacattccgcatatcacgagaaacggaaagcggtatgtgcagaaaccggcattaagagaatggctgacttccatgctggaaaaagaataacagctgctatgaaaagcgggaagagtttttctcttcccgttcattaagatttgccccactgcctctcttcaaccccaaacatacgacagatatcgttcttacgtaacgaaacatccccttcttttgatttcaaataaaaccctttcttatataaccgtatgacttcctcatatgtaagctcatgacgaaggaacgccattaaacgcccatctttttcatcttgtttattgaaccattcataccgttctgaccagttcactttctgaatgtcaaacaccttcccactttggattaatgcccttttcgcatttattatacttatttccccttttgtaaacactccgactgtctgtggcatttttgaaaacagccgtacccgccctattagtcaccatgttgacttatttcccttcgtgatgtatattgtaattgtcaacatggtgacaatttagatgggagataacttatggatattaaattactaatgaaggaactgcattttatgcaacaaagttacgcatcattattttcggttgtcaataaggtgcagactcggggggacgaatacttagaaatgttgacttcccgacagcacatgactcttattgctattgcccatttaccgacggaagataccacacttatgaatatcgctaaaaagctgggcacaacaaaacaaaccgctaacaaattaatttcaagtctctcgaaaaaaggatatgttcacactgtgccaagcaaactggataaacgtgcaatcaatattgagattacccctgaaggaaaaaaagcgttaatttcctgttcagaaagatccacctattttttagcggatatgtttcatgagttcacaactgaagaagttgaaacattctggaggctattgcaaaaactttatcgttttgatggtgaagaacaggacggttttgaagaaaaagcacatttgaaagttgaagaccaggcacaatccatctcagatgactatgaagaaaaaatcatggctgaattttcaaaacggcgatatgggagtgcaaacgatgaataatatgctttatcgaaaagtaaaagaaactgaggataagatgaaggaaaaatgctatgagctgaaagataaaattgatcaatttatttctcatgctaaatataaacttcattgcaatcgtaaactggaccgagccggcaattatatatcaattgccattggactctttatcctaactgcctcatggctgaccgcaacacaatggctgctttggataggcgcggcgagtattttgagtaatgcctgtttgctcattataaagcctgttaaaaattgaaaatctgaaaaaagctctctaaaagagagctttcttttattaatcgtcttagtcttcatcttcttcccgattttctttcatttcatgaagtctttcataaaagaactttataaaatgggcagaattaagttctttatagccaccgaattcactccaaataacaactggacattctcctttccgttactttaagtacatttattcacaaagtaatcttttttacaggtcatttagtggcagccccaggaaaatgcgaatttacaacgttaatcaaattcaaacataaaaaagtcgaattccctgtcctttaaggaaaacgacttttttatacggcttcttcaagtaaatccccattaaccttttttggggaagatttgtaacctctgcgcagtgaaattatacctgtgctagcccgccatctacgaacaattcaatacccgtcaagtaactgctttcgtctgaagcaaggaaagatacagcgttagctacttcttcaggtgtcccaacttttccagctggaacagtatttctggcattttccatcgctccttcaagtgcatcaccaaaaagctcatcgtatgcaggtgtaagaatcactcctggacttaccacatttacacggatttcagtaccttttaggtcaagaatccagttgcgaaccagtgctcttaatgctgctttagatgctccatatacactaaatgctgggttgccaattgatccagcggtggagcccgttacaataatagaacctactttgtccgggaatagtgataacgctttttgaacagtaaaaatggttcctttcacgttaatgccgaacgttctatcaacctgctcttcagtaatttcacctaatggaagaaagctgccgatgcctgcattagcaaaaaggatgtccaacttacctttttcctgctttatcatgtcatatagtttgtctaagtcttcaagcttagaaatatcaccttgaacaccggttacgttcttgccaatttggttaacagctttatcaagttcgttttgtctacgtcccgtgatataaacatatgcaccttcgtttacaaatttttgtgctgcagcaagaccaatcccacttgttccacccgttacaagcgctactttaccttcaaattcacccatacttaacactcctttagaattaatattattttatgtctagtacctttaagtacttgaagaacaacttacaagtaatagtatccttcagtaagcacattatcggaagtacccacttttttgtgatatagtaactaaaaagtaataaatgtggaatggagagctttagacatgaaaaaatttagctgtgggtttgaagtgacaaaggaagtgattggcggaaaatggaaaggccttgtattatactttttaatgaatggaccgaagagaacgagtgaattaaagcgcattatcccaaatataactcagaaaatgctgattcaaacacttagagagcttgaagccagtggacttgtgagcagaaagatgtataaccaagtaccgccgaaggttgaatattcatccactgaacttggagaatctcttaaacctatcttgcaggagctctgtcaatggggagaccattatgcggagcaaaagtatgcagaaggtgaatatgaaattgtacagccagaacaactaagttaggattgatgcagctgctgaagtaaatgctaaacaacttcaataccatcacctaacagatgaagaacagtcagaaataaatgagatattcaattttgaaagtgaagttataataagaagtgtcatggactatattcaggagaactttgatgaaattcaaaaaagagctgtttcaaatgttaaagagaaggttcagaaacttagccaaaagataaatgaagacatcagtaataacatttaatgcctatatggtctcttcgcatgcatcttttacacaaaaagacccggattttaattccaggtcacacttcggtcacaacttgctcaaattccctcttgcatttgtcgaactgctttattcaagatcataaaatttcaaacgaaccttacacgaaggaatcggggatcggcaaaacaaagccagatataacatatattaaaaaatctcttgcatttccacaccggccatgctatattcatatagcgatgagctgaattgtgtaagccgatgcacatgcccttgcggcacacacgaatgtggcgtgtggtgtatcgcctcaatacgcaaaagacgtttgcttctgcaaacgtctttttttattatccgattttcgttccgttcggtactgactgctctggcgtaagcaggacaacatctcctttttccgggatgccgccaagaacgagaacttctgacttaaatccggcgatccgccgcggcggaaagttgacaatagcggtaacctgcctgcctgtcagatcacccggttcgtaccgttttgtaatctgggcgcttgattgtttcatgccgatctcttcgccgaaatctattgtcatcttaatggccggcacctttgcttccgggaatacttccgcttttacgaccgttcctattctgagatcgagcttgataaaatcttcgatgactgccatatcaaaaactccttttttacaatcatgataccaaaaaaagacgcagtttatttaactgattttcaggattatttatcagattgaaaggtgtttcggaagacgcgcggcgttattcccttatgtctgacaaaccatctggtaaaggaagacaaattttgaaagccgacctcctgactgatgtctgtcagccggcattttgtttcaataagcatttgttccgctttcttcatacggagctcagcaatataagcttgcgggcttttccctgtctgctttttaaaccagtcggaataatacgccgggtggtaatgttccattgcggcaagctctttaattgaaaaagtctttgagagatttcggcggatatacgcaattgaatcattcgtacggttttcttgtatcttttcagcaatatattctgcaagcagactcaatgaatgagccgactgctgcttagtctcttctgtcagcagaaaccgaatcgatgtccaaaaagaatcaagcttattcagaacgccgggatcaaatgaacctttgaaaaaatatgccggtatgtcgagaacgagacattcgtttcgctccaaagaacggaaccgatgttcatgcccgggcggaatatacagcatttgatcaggttttaatctgatttcacgtctttctgtctccaagtccagctgtccttcgagcggaaagagcatttggcagtatgtgtgtgcatgagaatcaaaaatatgtgaataggtgcgccgctcacaaatgatatgttgtaatgaatccatttgtccctccttttactgatgcgtttttttatttagtttacataataatattattgttacctaccctgtaaacctcttaggaaagcaacaactgcaaacttccggctttccttaattgattcggttaattcaaatgcactctgttttctcaacacggcaaagccgtgaagaaggctcctcagtcctctcgcagcatgaatcgcagtgtcagactgtgcataaccgttagctgtcagctgcctgacaacaagctctacaagcaggcttgacagattctcaatccggccgtcttttatcttttgaaatgttgcgtcatataatccgggattggcttcggcgaaattgatataggcatcggcaagagcgagcaaagccgtttcacccgtcagtccttctgcagaggccgccattttttcaaataacatagttaaaccggagacagccagctctgttttaattccttgaaggccattgacaaaattgtaaagggaaggcggttttacgtttaaggactttgcaacggccgcaagcgtcacttcgttcagcccttttttgtcagcgatgcctgctgcggctctcaatatcatgtcaaggctcattccgactctcggtgacattatgatcggcctcccggcaggcttcgttcagcttcctcagcagcctcagccatcatttcaacgggattgcagagaacatttccatgtccggcggccagactgcttggttgatgagcgataagcgttcttgctgtttttacagcttcttctttattccacgtagcaaaagccggaaacggaaatttccatttcagcttccctgaaacagcaaggccgccccgtacttgaaaggcatctccgacgatcagcatatcatttctcatatctttaaaagcgaggcttcccggcgtatgaccgggagcgggaatgacaagtaaagatccgatccgctcgccgcctttcagcaggcgatcaggttcggtctgaacatttttcggcactcccccctttatcggcgtttgtgcttcatgctcaaataatgaagtgtcacctttcagcaagaaagaatcccgctcagaaatacagacggaggcatccggaaattccgcagctaatgagtcaagcgaaccgatgtgatccccgtgcgcgtgggtgagtaatatgtcattcagcggcttcccaagctgccgcaatgcttgtttgattcctttatgactgttaggcagtccggcgtcaatcagggttactcctacttcttcttcgaccaaataacaattcaccgggaaaagcgctggaaaaaaagtcagctgccaaacccttccgtattgtaagattctcatcaacatccccctaaaactaatatcgttagttttattataactaataccgttagtttatcaagagttttctgtttaaatcctgaaaaaggcgcgggcgcttctcttatgcaaaaaaaagaaacgcgcatactgtgataaaagatgctttcagcctgcgaataaatcagactactaaaaccagccggataagcatacactactcaacggagggggagtttcacaccatgcatatcacacttcaaagcatctgccctgtcttaatgattgccttttttctgtataaaaaggtgaaacggtccgtcggctttcagcctttgaaaccccgctggctttatacaagaatgattttgttttcattgctggccgcagctctggcgtttttcagcatcacacacccggctttatacggccatcttatattcggcactttttgcggctggcttctggtcctgtttgccaaacggaatatttcttttgaagaacgccgcggaaaaatgtattttcgcactcatctgtggattgaacttattctattaacgtttttcctatcgagatttgtttatcgcgttattgaaatttaccgggtcacagcggactttacccatccggaggcatacagccaaacggtcggggccgatccgctgaccatcagtatcttttatttcatcgcagtttattacagcggcttctctttttatgttttaaaaacgagcagagaccaaaccaataacagtcagtacggctgacatccctgtctaaaaagcagggatgttttttaatcgtgccgcgtatggtgaatcatttgctgaagcacatctaacacatgttcatcctcaggagaataatagatggatgttccttctctgcgtgatttgacgaggcgtagatttttaagaaaacgcagctgatgagaaacggtagactgcagcaaattcagcttttctgcgatatcatttaccgcgtgttcaccctgtgacagcaaatggagaattctgattctggtcggatcagacagcgccttaaaagtctgggcaaccaaaaataaagtttcctcatctaaatcgacagcggggtcattcgtctttccggattcgtgaaattcagtcatatacctcacccttcttttctcaagtagcccaattataccaaatgtcaattgatgcagatacatcctgcgcctgacaaaagaaccgttattttaaatttatgtttcaaatacgggtttccgcttggtttcgcgcatccatctgtgtcataatgaaaaagtcataatgctcctgaaattgagggtgaaacacagtggagaaaaagaaaaaaggctgtttcgctgccgcgggtcttatgatgatatgtgtttttgtcatggtttccttcttcctcattctgttattttcaaataatgaatggctcaaaagtcttccgtttgatgtcaaaccgatcgtgcttgaacggctgacagattacaaaccgcttgttgaagacgagctggatgaaaaaggactcaccaaatatacatcgcttgtactcggcatgatatatcaggagtcaaaaggaagaggaaatgatcccatgcagtcttcagaatctctgggtttaaagcgaaatgagattaaaaaccctcaaaccagtatcaaacagggaatcaaacaattcactctcatgtaccaaacaggcaagaaaaaaggcgtagacttggatacgattatacaaagctacaacatgggagccggctatattgattttgtggctgaacatggaggatcgcatactgaggaactggcaaaacaatactccgagcagcaggtcaaaaagaatccgaaactttacacttgcggagggaacaaagacaatttccgttatccctactgctatggtgattacacgtacgcagaaaaagtaaaagcaaaaacaaaaaccgttgaacaatccttaaatgtaacaacacttgaaacgcttgaagagtaaaaggcgccctgatgaggcgcctttttccatcaatagaaaaaagccgcgcagagcacggctttttttaataatacggtgagatcattaagtatacaatgacacccgtcagactgacatacagccagagcggcatcgtccatctcgcgatttttttgtggcgctccacctgcatgctgaatcctctgatcagcgtaaacagcgcaagcggcacgataacggcggaaagacagatgtgcgtaatcaaaataaagaaataaatcccccgaatgatgccgtggccgccgaataaagtattctcagctatcgagtggtacacgacatagcagatcaaaaacagcagagtcgtcgtaaacgccgccaaaataaagcgtttatgcgcttgaatatttttttgcttaatcataaagagcgctgccagcaaaaagataaaagtaaagctgttaaaaatagcatttaacatcggcagaatatgaatattggcaatgctgacctgtcccgatttcggcataaaaaacagcaccgcaattaacccgttgatcaaaacggtcaatgtcagcacgataccggtataacttttaggtttgttttctgtctgattcatcttatgacctctctcaattttactgactatccaaatggtatgagaattcagctttgatgtcaacggtttcgtccgcttcgtcagaaattagacaaacttaagccctaaaaagaccgggtgtttgagacccggcctttcgtcatattatgcttccttcaacagttcttctatcactttatgttcgttttcattcaacagattttttggaatgatccgatctatcggtttattcatatgctgatcgagaatatcggctgtttctttgtcccctgcgattacgagacgctcccattggtgtgaagcggccttttgatcaaggtttgaagccaatcgtttatacagcctgttttggttttcttcgacatgggctttggcggcgtcttcgtccattgatgcggagcttccgcttacatcctgcggtttccacgattcattgatgacgtcgtattgataatgctccaccccttcaatttttccgagtacggtttctatgatcttcacttcattctgctgggtgagaataaaagccgtgcttggaaattgttcacggagaagttctaattgatcaaggacagccgtttcttcccaataaaatcgtgtttcgacaggcacctgcaattcaatcgtctcccagacaccgccttcccccgatgcaaaaaatacgaggcttcgcggcatctctttaccaagcccatcgatatattgatagacacgttgcatgatgcggacgagagatttttcttcttccggatcacttacagacagatactcttttaatctccgaaaaccggttttcaaggcgattttccactctcccccctgctgatccggatttctcatatccgtatttacatataaggaaagcattttatcaggagattccgtcattacgtacttcaatttgccgatgagtgagtcaattgccattatagattcctcctttttccgctgctcactgttcctttccctatccccaccgccttaaaaacgtcaatccacatataaacggcagacttttctaaaaaagtttttgcaaaacccatttacaaaccaagacatcatttactacaatggatacttgtgtttgactaagacttttacgctgtgaaaggagtatgattttgtttactgcagaagaaagagatcagaaagagctggaaaaagagcttcataaacttgaatttcagattttcagaatgcgggaaaatctgatagatgtatcaaaagacgcgcgagtgcttggtattgatcaatcgaacaatgacgattggatcattgtttcctcgattgatgatggccaaacatgtaagattatgctgactgattgtgaatcagcctaccggggaagaggctgtttttcactgatcgcttcttattatgacaatgccattcatatcggggatattaaaggcccgccgaaccacggctacggctcgatctgcatgaaatttttaaaacatatcgccagagagcagaatatcccgaaagtgacgggcgacatcgctaagcgtgattgggatcatgtcgaccggctcgttcatttttatgaaaagcatcaatttgatgtctggattgacaatgatacgcaatcaggcggcattaaatgggtcgacctgtaaaaaatgatagataaaccctcgttaatatggtgtaatagattaaaccatttaaggagggttttttttgtatccggaaaaattgaaaaaaggcgacggcatccgtattgtgtctccggccacaagcatgtccgctatgtcagatgaaaatataaatgccgcgaagacaaaattggaggagctgggcttttgtgtctctttttcagagaatgcgaaagaaataaatgaatttcattcatcatcgattgaatcgcgtgtacgggatctgcacgaagctttcgctgatcctgacatcaaagcgattttgacgacactcggcgggttccaatcaaatcagctgctccgctacgttgattatgaaaacatcaagcggcatccgaaaatcctttgcggctattcagatattaccgctctcggccatgccatatatcaaaaaaccggccttattacatattccggtccccatttttcttcatttgccatgaaaaaagggctggactatacgattgactctttcttggcctgctgtgcttctgacaacccgtatgaggtaaaaccttcatccgagtggagtgatgataaatggtatttgaaccaggaggacagacgtttttatcggaatccgggaccgctcgttattcagcccggatatgcggaaggaacactgatcggaggaaatctatgcacgctgaatcttctgcagggcaccgaatactttccggagatggaacaagtgattctgtttatagaagatgatcatatgtcggacattcatatgtttgaccgggatttgcagtcactcatccatcttcccgctttttcagccgtgaagggaattgtcatcggacgtttccagcatgcttcaaatgtgtctgaggaggctctgcgtgccgtcatccgtacaaaagaagaactgtcatccatgcctgttatcgcaaatgctgatttcggccatacctcccctttgatgacattcccgatcggaggagcatgcaggatagaagccggctcagaaggcggacggatatggatcgatcggcattaatacataaagacgggaaaaccgccccgtctttttattttgacgccttatgccgcggcgtgcgaggagcgatcataattcgtccgccagccgctgccctcacccatacggaagctccttcataaaaacggctgatctcttcattatatacggcgtgtgtcagttcacgtttatcatgcgttccgtcttggttttttacgtttaaaataagtacaagctcgtgcctgccattcttcatcacgccagtacgtctcaccttttcaataacggctggccttcctctccctctgtcaagcgcctgaaacagcctgacagcaggcatagacagtccgataacgagcacaatggcgaaagcggtgcatatacctgcttgaaacaccggtgattctgtgaaggtattccataaacatatacattccggctccatcagattcatcccttccgattcttttttcacatccattccttattatattagagaaacgctttttctttttccgcatataacgattatatacagtcaaaaaagggaagaaaaaaagaacacaaagcatttcgccttgtgttcttcatctctatatgaaactagtctaatactttaacatttactgttctgacgccccagttgttagcgtcacttttctttgcaacaaatacgtcaattttatttcctttaattgcgccgcctgtatctgctgctgttgccactccgtaaccttcaacataaaccttagagccaagcggaatgacactagggtctaccgcgatgacttttgcatcagggtttttgtttaagtcaacaccggttgccgttacaccggaaatgccgccgtcgttagcagagtaagcagttgcagtcattgtcatctgctttttaggctcttgttggtttgtatttgattgaacaggctgctgttttgcttcgacagccttcgcttcttgtttaggttgttgttgttcttgaacaggttcttgtttaggctgctcgtttttgacagcttcttgtttcggctgttctgtctcagcagctggtttttgttcagtttgcggctggctggcttcttgagccggctgtgcagcctgagcctgagcctgacctttcacatttaacgttgtgcctgcgtaaattatatctgattgcaagttattcaagcttttcagattgccgactgatgttccgaatttctgagcaattttccagaggctgtcgccctgcttcactgtgtactgcccagatgtggttgtttctactgaagaaatagtcagtttctctccttcaatgattaaatcagaagataactgattccattcttttaagtcctttaggttcactccgtttttttgcgagatcccccagagcgtgtcacccttttgcaccgtgatttctttagcagaagcgtgagctccaaatgcagttgttgaaattgctgcaactgcgacaaaggacataatcgtcttcttcataagtaaatcctcccttgttagctttttattggcggctaacaggtgatatcgtaacatatgaaaatgtcagttcaataacaaaacgatttgaattagattacagttcctttacatgaaacatttctctcgcttggtaagtcttgctgaaaccttgatacagcaagggttttcaagcttctgatttttccggcgcccatgaaaaacacaatgtgcaaatttctaaaaaaactttttttcactctgtttctcttacataatttcggatttcttctaaaaaaaccgctccgtatttcaatcttttttgttccccgaccccttttacggaaagaagatcctgatctgttttcggaagtttcgccgacatttcttttaacgtctgatctgagaacacgacaaatggaggcacaccctgttcagctgcaatctctttgcggagacgccggagaagctcaaataattcatcattttcggtgacggcggcggcctgtaaggcttcttttctcgcgactgcgctttttccaagcagaacgtccctgcctttttgggtgaccataagcgtgggaaatgtgccgtccgccattctgatatattcatctgaaataagaaattcgataaaatcactgatttccgctgcggattgatgcttcataatgccgtaagtggacaggctgctgaagccgttttccagcacttttttatttttagacccgctaagcacctgcgccaccatcgtttttccgaagcgctcattcattctgatgatgcatgacaataccatctgcgcttcttttgtaacgtcatgggcggtccttgtatcagtgcaattgccgcacgcttcgcaagcttccgcctcattctcgccgaaatacttcagaataaaccgctgcaggcaatcttccgtatgacagtaatccaccatctgtctcagttttttgagatcctgcttttgtttttcttctccggcggccgattggtctattaaaaaacgctgcaccataatatcctgcggcgaaaataagagcacacactcgctgttaagaccgtcgcgcccggcccgtccggcttcctggtaatagctctccatatctttcggaatctgcgcgtgtaaaacaaacctgatgttgctcttatcgattcccattccgaaagcggacgtagctaccatcacttgtatctgatcgttaagaaaacgctcctgctggtcttttctgtcatcatccgccaatccgccgtgataacggccggcattgatgccgctgcgttttaatttctcatataaacggtcggtttcttttcttgtcgctgtatatataatgccggcttcgtgtttatttttttcgaggtaccgctcgataaaccggtctttgttttcgccctttactactttaaacgttaaattctctctggcaaaaccggtatatacagtttgttctttcttaatatgaagctgcttgcagatgtcatcatgaacctcaggcgtagccgtcgccgttaaggcgatgatgacgggcggttcttttaattcattaaaaaggatttcgatattccggtaactcggcctgaaatcatgtccccattgcgatatacagtgagcttcgtcaattgcgacaagaggaaccgtaatattctgcaggatgtgaatgaattcagaagaagtcaaacgctccggtgtgatgtaaaagagccggtaagccccttgtttcaaaccggtcaggcgctcatgaatgtcacggcttgtctgggtgctgttaatataagctgccgcgatacccgcttcttcaagcgcgtcgacttgatctttcattaaggaaataagaggggaaataacgattgtggttccttcaaacagcagtgcgggaatctgatagcagattgattttccgccccccgtcggcataatgcagaccgtgttttttctctcctctgcaactgattgtatcgcctgcttttggcccgcgcgaagactgtcgtagccaaaataatgcgccagaagggattgggctttatccagcatatgttgtaaaacctcactttgtctttgattctttcattttatcatactgataaagtacgctgctcaagggcaattcaaaataaaaagccatctccgcaagggaaatggctttcgctacgtatgccgtacgcaagtaagaaagttttaaaccaccactcctcaaagtgggtgtttgcagaagcgttcctgtcgtcctctgcaatggaggcatgacattccggcttcgatataaaactccctattacagcttaaaggttaaaacttaattaacaatacgaacaatgtagcttctcttatatcctacaccatcagtcgtattttggcaagagggttaattcttttacagaaaaccttttttctttgtgaaaaatgctttattctacataaaaattgttttttcgacaaaatatcaatatatcaatataagattgaatcgaaagctgccgccagtttcttctataatagaaaaaactctcacaccctgtaggggcgcaagagttatggcaattagaattttgcagccagatctttcgcttcttgcagtcctttttcaatgatcgcttgagcgttatccggtgcagcattatgaccttcaacgacaacagtgtgaagatcttggacaccccagaaaccaagaacggttttcatgaagtttaatgacatttcaagagatgccatcggtccttcagaatatacgccgccgcgtgcgtttaagagcgctacttttttatctcccatcagacctttagggccttcaggcgtgtatgtgaaagtaacccctgcgcgagacaggtaatcaacataagtatgaagcacagcaggcactgtgaagttccaaagcgggaatgcaaacacgactttgtcagctttaacaaattgatttaagtaaatgtcagcagttgacgcttgttttttctcttcgtctgtcatttcaattcctttagaagctttgaatgttccgttaatcatatctcttccgaggtaaggaaggttttctttatgaagatcaagttcgatcacttcatcattcggattgttttctttataagcagccagaaacgcttcgtataattttacggatacgccttcttcagccgtacggtcgcttgattttacaaataatacttgagacattctaaattcctcccggtaatcttttaatatttacttacaaatagtatgttactttcttttttatataaagtcaatgattttatttcgattctgagattttttatggaataaaaaaacaggtacatatgaatgtacctgctgctattattgtgaatcctgctcgcgatccaggatttcgtaagtttgtgagcttttttgatcaacggtttctttatttgagaggtctttcacctgctcgtgaaattccctttcatatgacggagcgtctgttttcacatccccttctgtttctcgctgcgcttcgacggtcattctggcgtacggtacggcttcaagtctttcataaggaatttcttttcccgttttctcgcaaatcccgtatgttcctttatccattcgttcaagcgcggcgttcacctcatctaaaagattctgatcgacaccgtccagcgtctgattcgtgaccctgtccaaataaatgcttccgtgatcagctaagtgattatctactccgttcgacagttctcctgtgtcttcgctcattgaatgattttctttggattctccctgaagactttcctttaaatcgattaatttatgataaaggctgtcctgctgttcttttgataatgccatattcatcatctcctttttcgtctgtattcttcgctgcatctgttaatacataccctcgaaaaaggaggatgaaacaatgggggtcaatgctttctccccctgatggtgacattgggtgtctgctgctttgtctgtcttttttctttcgcagcatcattttgcgggttgtcccgactttcttcagcgcaggcttgtttgagcctgtgcgccggtgtatggtaagtggcgccgatattcagcataccgctcagctcttctatactcagctgttcaaaatcaatattgtattcaatcttgtccactttgacgtgctcaatatggacatatgttttttccccttcaaccgtttgcggctcaaaatgacacttatcctgaagctcatcaagctgttgttccactttcttaagccggtctaattcttcttcacacacttttttgaaaatctctttcattatttttttcaaagaaaatcacttctttccccgtcactcttggaaagttctatgcgtcccgtattgcgaatatataaacatgatatacaaaaaggaggcgaatcatgatgttttttccatccgttatcaactttgagtatataaaaatgaacggaatcagcggcggagcggcttttaacaccggctcttccgttatggtgagaaacacagcagccaataaaagaaatgaagggtacggtgaacaaaacggtgattgcaccgttgtcgccatccctatcatgagtatcgatgattcagatctgatagatggcacagcgaacaagatcagccttcgataatgatctggcttgcatcccccagatgtttagcaatcgatatatataaaatcccgtctttgaataccgcctgcattcccttcgtaccttgagcggaatgcggaagatcgagttttttttcaaaatcgccgtattttccggtcttctgtttaaaatcctgttcattgaaaaaggattttctcgtgccttttacgacaatatattctccgtaggacaacagctgaacatcttgtttccggtagccgggcagatacagcaaaaattggagctcatcatgggtttccacaatatctataagaggaaaagcatcctcatttcttctcatttgcccatctccctgttgaaagggaaaatgagaatggccgttttgaaatgatttcagttgttcatcatcaaaaacgtttttccaaaagtcgccgccggacatgttttgcgccatttccatccattgcttcatcttatcgaaatccatttttatcgccccctgtctaagcatacggtcataacagccggcatacacctgtattaaaggaggtttgcctgtggttcaaccaactccatatatcaatattaatattttcatgttgaaaattaattcctttgaaaatgcttcagcggtgaatgtcggacaaaatttactggcggaatggcagaattctgataaaaagaatcagggatacggacagaacttcggagatgcaagcggcttcatcggcacgaacggcaaagtggatgaccgggatcaaattgattctccatcaacctttgagtctgcatgcgacaaaatccctgccggaaaaggaggcccattatgatgttttcgccggttttggtaaatgtaggaggctttaaagtaaatgcggtcgaccgcggttcttccattacgatcggcccgtatcagcaaatcgattattttttatccaataagatcaactacggattcggtgaagaaaatggtgatttggcgccgatttatatccccatcagttctatcgctgacccggatctcattgattcgaactccggaaaaacaagcattatataataaaaaggccatccgcatgcattcggatggcttttatgtgatatttaactgcataagtattttgttaagatggcttgaacctcagtcaagtccgtttcttttgcaaattccaattcgaaagtttttccccttgtcattaatacaagcccggtatcgggatcaaacatccccgcttcttgaatggcgaagctttcaattgttttatatggaagaaatacgcgcactttctttttggagaacattttattatcaaagaaaatcactcgtttattcgtaaagcatatttggtcaacccgcagtttataaatcgtttcgatccgttctccctcaacgagcaaagcctccagcttttttgtgtcggttgatctgctgacagaaaaaattcccaatgaagaaccccactttctgcttctatactattgttttattacaatcataaaaaataagttctttatccctatataagaatacgacatagacggcatttaaaccattacgaacagattacatttttagaacgttcatcaaaaaagcccttcgcgaaaggtgccgcagttatgaagtaatacggttcagcggaagaaaaggtttcaagaaaacggtatttttttcgaaaagtcagttttttattttcgccataaaaaaccgcggcttctccaatgccgcggtttcaacaaaacatcaacgatccgtatcttcaattgttccttctttataggtatctgaaatttgttccatcgtcgtgtcggtgccttcttcaggttgcacttgctgaagctgatctgatgttttattttgtttgtcttgctctgtttttttcattttgcagccaccctttatatgtagtcttttttagtatggctcaggcaaaatgaattcattcagccttaaacttcttcaaaatactctttgtagaagcctccgactttgtttgtattgtctgcaacaaaaatgaattcttctgtttcatttttgacttcatactctttacccggcgtcagcacatttttgacaatgtattttttcgcatctgtatgtacgcatttgacctttttgacgctttcttttgtctgccaattattatgaatcatttataaaactccttttcttaatcgataagcttattgtagccgttttttcttgtgaattgcaataacggttatcgattgattttaccgggggtgttattatagaatgactgtatgcgcttactttgcgcggacatcaagatgctcaaaacagaccataaaaaatttcgggaggtttgttacgaatgagttctttaacgatgcagatcacaaaaaggctggaaacatttttacagggtacgaagaaactttatattgacggaaaatttgttccgagcgcttcaggatcaacatttgtcacaccgaatccggcaaccggagaaacgctgatgacgctttacgaggcacagacagaagacattgacagtgcagtgaaagcggcacgcaaagcctttgatcacggcgaatggcgcactatgccggccgcttccagaagcaggctgatgtataagcttgccgatttaatggaagagcacaaaacggaactcgcgcagcttgaaacacttgataacggaaaaccgattaatgaaacgacgaatggggatatcccgctcgcaattgagcatatgcgttattatgccgggtggtctacaaagataaccggacaaacgattccggtcgccggctcatattttaattacacccgccatgagcctgtcggcgtcgtggggcagatcatcccttggaactttccgctccttatggcgatgtggaaaatgggcgccgcccttgccacaggctgcacaatcgttttgaaaccggcggagcagacaccgctgaccgccctctatttagcggaattaatagatcaggcgggcttccctgacggcgtcatcaatattgtcccagggttcggcgagacggccggggaagcgctgaccaaccatgacgatgtcgataaactcgcttttaccggttctacagaaatcggcaaaaaaatcatggaaaaagccgcaaaaaaaattaaacgcgtgacactggagcttggcggaaagtcacctaacatcattttgcctgatgccaatttgaagaaagccattcccggcgctttaaacggggtcatgtttaatcagggacaggtatgctgcgcaggctcccgtgtcttcattcacaaagacaaatatgatgaggtcgtcagcgaaatggtttcatatgcgaaatcgcttcagcaaggcgccggccttcaccaagatacacaaatcggcccgctcgtcagccaggaacagcatgagcgcgtgctttcatatattgaaaaaggaaaagcggaaggagccaaagctgtcgcgggcggcagctgcccgtttgaagaagggtattttgtctccccgactgtatttgcggatgtggatgacagcatgaccatcgcaaaagaagaaattttcggcccggtcttagccgccattccgtatgatacggttgatgaagtcattgagcgggcgaaccgctcggaatacggtcttgcagccggactttggactgaaaatgtgaaaaacgctcattacattgctgaccgtctccaagccggcaccgtttgggtcaactgctacaatgttttcgatgcggcatctcctttcggcggctataagcaatccggcctcgggcgggaaatgggctcttacgcgctgaataattatacagaagtgaaaagcgtctggatcaacctggaagattaaatcaaacaagaaactgctgcctgtcagcagtttctttcttttgtcatgccgccttttacatatgaatatatatgcttctgaaggagttgagcgagtgtgagcacaattcatgaaaacgtcagaagccgccaaaagaaaaccatctccctattaagagaaacgcaaaatgcggacggctcatggtcattttgttttgaaggtccgattttgacaaacgcctttctgatcctccttctcacttctcttggagacaatgataaagaactgatcgctgagcttgcagaaggcattcgcgctaaacagcgcccggacggaacttttgccaactatcctgatgaccggaaaggaaatgtgaccgctactgtacagggctatgccggcttgctggcttccggtttatatagccgttctgaggcgcatatgattcaggctgaacgctttatcatctcaaatggcggcttgcgcaacgtacacttcatgacaaagtggatgcttgcggcaaacggcctttacccatggcccgcgctgcatctgccattatctttcttagtcattcccccatccttcccgctgcatttttaccagttcagtacatacgctcgtattcatttcgtaccgatggccgtgacgcttaacaaaagattttcgctgaaaaatcccaatgttccgtctctcgcgcatttagatcggcatatgactaaaaatccgtttacatggcttcgttccgatcatgatgagaacagagacctctcttctcttttcgcgcactggaagcggcttttgcagattcctgccgcttttcaccagctcggtctgcgtacggccaaaacgtatatgcttgaccggattgaagaagacggcacattatacagctatgcgagtgccactatttttatggtgtacggcctgctcgctctcggtgtatcgcgccactcccccgttatcagaaaagcgcttgccggcacgaaagctttgctcacgtcttgcagcgatataccgtacctggaaaattcaacgtcgaccgtttgggatacggcgcttctcagctatgcgcttatgaaaagcggcatctcagataacgatcaaatgataaccggagccgcccggtttctgcgtgaacggcagcagacgaaagtcgctgattgggccgttcacaacccgcatgctgaaccgggaggatggggtttttcaaacattaatacaaataatcctgattgtgatgacacagccgcagtgctcaaagccatcccgcgaaaacgttatcccgcctcatgggaacgcggactgagctggcttttgtccatgcaaaacagtgacggcggcttctctgcttttgagaaaaatgtcaatcatccgctggtccgcctgctgccgctggaatcggctgaggaagctgccatcgatccttcaacaagcgacttaaccggacgggtgctgcactgtttaggagaagcggggctttctcctgatcaccctcagattgaaaaggccgtccaatggctgatccgccatcaagaagaggacggatcgtggtacggcagatggggtgtctgctatatttacggcacatgggcagcgctgacagggatgaaggcttgcggcgtgagccaaaaccacccggccgtgaaaaaagcgatccgctggctgaagtccattcaaaacgaggacggaagctggggagaatcctgtaaaagcgcagaagtcaaaacctatgttccgctttcttacgggacgcttgtacagacggcttgggcggccgaagctttgctgcaatacgaaaaacctcatcatcaagccgtcacaaaaggcatatcttttcttattgaaaaccggcattacgaaggagacgctttcagctatccgaccggaatcggcctgccgaaacagttttacatcaggtatcacagctacccgtatgtgttttctttgcttgcgctcagcacttttatgaaagtgagtgaaaaggaggaagaaaaatgaaacggcacgcttatcaaaccgaaatgctgaattggtgtgaaaccttgaaggaacaagtcatacagcaaggtcggttcgatcgcttcgcggcacaaatcgaccggatttttcacacccttcaggatgatggattaacggaggcggaatggtacgaacaggcatcagcactttaccgggacattaccgaaccggaagagccggatgagcgcagagcctatgtgccgatcggcaagcatgtcctccctaaactgccatacagttattccgcactggaaccgtatatttcaagagagattatgaaactccaccatactaaacaccatcagagctatgttgacggtctgaataaagcagaactggagctcaaaaaagcgagacaaacgaaacagtacgacttagtggcgcattgggagcggcaattggcgtttcacggtgccggccattatttgcacagtattttttggttttccatgaatccaaacggaaaaagacggccgacgggtgcgctctttcaaatgattgatgtgtcattcggaagctattccgcttttaaagagcaattttctcaagcagcaaaaaaagtcgaaggagtcggctgggctatccttgtctgggcgccgcgctccgggcggctggagattttggccgctgagaagcatcagctctacagccaatgggacgtcattcctttgcttccgctggatgtatgggaacacgcctattatttacaatataaaaacgaccgcgcggcttacgtggatcaatggtggaatgtcgttgattggcgggaggcggagaaacggttcgagcaagcgcaccgcgtgatgtggccgctttattaaaaaaggcccccgtcttgaacgggggcctgcttcttttggtctaaaaaataccaagcacgtgcagaaaaacgataataatggctacaggagccacataacggattaataggagccagactgcaaaccattttcgttttataccggaaccgcttttcagttcgtcaaacagcatctgtttcggaattttcagcggtacgaacacggcaattaaaagcgcgcccaacggcattaagacattgctgaccagaaaatccgcagcgtcaaaaatactgcggtgaaaaatagaaacatcactcaaaatgccgtacgacagcgccgaagggaccccgacaataaatatagcaagtcccccgatccatgcataccgcttccgttttgccgaatcgccttttgacaaaacagcaactaaaatttcaagcattgaaaaagccgatgtcagcgtcgcaaataaaaacagcagcaaaaaggcgagtaaaaacacgatgcccaacggcatttggttaaagacggtcggcagcacgttaaataaaagctgcggaccttgatccggcttgagaccgaatgcaaataccgccggaaaaatcgccactcccgccatcacggcaacaaggacatttaataccgtcaccgatacggcggattgaacaatattttcttctttttctaaatatgcgctgtatgtaaccattacggacactccgacgcttaacgagaaaaatgattgacccatcgcatataaaatggtattggcatccatcgcgccaaaatcaggcatgaagaagaattttaatcccttcgctgcatcatgcagcgtaacggagcggatcattaaaagaataaacagaataaacagagccggcatcagcacctggcttaccttttcgatgccgctgctcaccccttttgccacaactaaaatcgtcagcacgataaacagcagctgaccgaaaaccgctgcataagggtttgaaatggtatcgataaataacgtatcaaatcccgaagaaagcgttaaaccgcctgtaaagccttttataatgtagattaatatccatccccccactacgctgtagaaggataatagaataaaacacgttatgattccgagatatccgatccagtgccactttttccccggcgccagcgccttataggattcaacggcgtttttttgtgtttttctgccgataataaattcagcaagcaaaagcggcagtccgattaaaacagtaaataaaataaaaacaagcagaaaagcgccgcctccgctggttcccgctacgtaagggaacttccatattgcgccgagcccgattgcagagccggccgtagctaaaataaatcccagcttagatgaccattgattagcttctttcacttcagcactcccaattcatttcagtataaaaatcaattgtaagaatatatgtctgaatagtcaagaagatattagtttacataataattttatcgaaaacttatatttaatattgaattattcagaatattatttataatggagtacagaaaagtcagtcatattttctgactgattgattggatgtaaaaggagctgtgtttatggaatggctgaaaaaaataagcgggtttgcgggccaaacctttggcttgtgggttatcgtctttgccggtttgggattcgcctgccctgatttgttttcttggatcagttcttatatgacgattttccttggtattattatgtttgggatggggcttactcttcaagcagacgattttaaagaattaatcagaaagccttggcatgtcgtgatcggagtcgctgcccagtttacgattatgccgcttgcggctttctgtttatcagtcgggctccgcctccccgcagaaatcgccgcgggcgtcattctggtcggatgctgtccgggcggtacggcatcaaatgtcatgacgtttttggcgaaaggcaatacggcgctttctgttgcggtcaccacgatctcaacattgcttgctcctattgtaacgccggcacttattatgctgtttgcgaaagagtggcttcccgtttctttcggttcactgtttgtttccattatgcaagccgtgcttttgccgatcgtcctcggggtgattgtgaagctgttcttcaaaaaacaggtcggacaagccgtgcacgcacttcctctcgtatcggtaatcggcatcgtagcgattgtatcctctgtcgtcagcgtaaatcgtgagcatctgcttcaatccggactgctgattgtgtctgtcgtcatcttacataacggaatcggatatttgttaggattcctgactgcaaagctgttcagaatggattatgcttcacaaaaagcgattgcgatagaagtcggaatgcaaaactccggactgggcgcagcgcttgcgacagcgcatttctcccctttgtcagccgtgccgagcgcaattttcagcatatggcacaatctgtcggggtctgttcttgccacctactggtctaagaaaaaagagaaaaacagcgccgaagaagaaacggcaaagattccgttttcataactgaacaaggataggctgccgccgctcctatccttgattattctgcagatcacgaaacaggcgcaaaagcgctttttttacatccccctgaaataaacctccatgataacaaatcaattggcggatatcgtaatcaagcagccgctgcacagatcggaccgcatcatccatatgtaacgtatagtcaggattagcaagtttcagctttccgtcttcaatgacgaccgcatcacctgtgatcattgttttttcggcaggcagataaagactgatatggccgggtgtatgacccggcgtggctacaacgcgaatgcctccgcaccaaggcagcagctcaccgtcagtaactgtccggtgaactggagccgattcgactgattgaagcgagcaaatgaactgttttgcataaggctttgcatcctctggcaatgaactaaacgttgattcagcctgctcaagccgtaaagattttttagagccgtcaatatacggcgcttcacgctcatgtactgtcacgctgatatccgggtgcaaacgatgtaatgcagcgagtgagccgatatggtctatgtcgtgatgcgttacaatgatttttgtcaatgaatgaagcgacattccatgccgggcagcagcatgttgaagatggtttgtaaaaccgggatatccgcagtctattaatatcgtgtcatgttcgtcttgcagaagaaccggagtgatagaatgcaattcttcattatattcaaattcgatctcaagcggataacagcttttcatataaattctccccttcgctcaataaaaaagtacactgcttgtaagggcagtgtactttttgtctgtttcaaattatccttccagcagcagctgttccggatcttcaagcaggtttttaatggtgacaaggaacccgaccgcttctttaccatctacaattctgtgatcatatgataaagcgatgtacatcatcggacggttttcagagcgctccgcatcaattgctactgggcgcagctgaattttgtgcatacctaagatcccgacctgagggctgtttaggatcggtgttgacataagcgatccgaatgtacctccgtttgtgatcgtgaaggagcctccttgcagctcacctaatgttaatttattgtttcgcgctttcttcgcaagttcgccgatctctctttcaatgccggcaaacgtcaggcggtcagcgtcacgtacgactgggacgacaagcccttcttcagccgcgacagcgataccgatgtcatagaattttttcacgatcagctcatcgccttgaatttcagcgttaaggagcgggaattttttcaatgcagccacgacggcttttgtaaagaacgacatgaaaccgagttttacatcgttttgctcaaggaattggtctttacggcgttttcttagattcataacggccgtcatgtcaacttcgttaaatgtagtcagcatcgcagaagtctgctgcacttcaaccaatcgtttcgcgatcgtctgtctgcggcgggacattttttgcacttcgacaggtttgtcaaagctttgctgtgttttttgagcctgctgtttcggctgtgccgcaggttttgaagccggtttttcataagcttccacatcttgtttgcgcacgcggccgagcgggtcccccgtcggaatttgtgatagatcaatccctttttcccttgccagcttgcgtgcagccggagacgctaccgttctggatttcgcttctgattgtgcttcctggctgacttcttgtgcagcaggttcagcttttgcttcctctttcgtttgttcattggctggagcactttctgaaggggcgggtgcagaactttcgccagcgccttctgtaatggtaccgataatttctcctacttggacggtatcacccgaatctttcaatacctcttttagaacacccgattcttctgctgtcaattcaacatttactttgtccgtctccagttcaagcaagtactcaccctgttctacataatcaccgggctgctttaaccattgggctatcgttccttctgagattgattctgctaattcaggtaccttaatttccgccatttttacatttcccccttagtttttgcgagtcaagctatcagatacaatgcgttcctgttcttttttgtggactgtcggatctccttctgcgggactggatcgtcttcttcggccgatgtattggacatttactccttttggcgcaatttccgtcagatacgggctgatataactccatgcccccatgttctgcggttcttcctgaacccaaacgatctcttgcaggttcggcagtttggcgaaaagctccttcgtatcttttgccgggaacggatacagctgttcgattctggcaatatgaagccaatccttatcgccttccattttgttgaagtgatcgctgatatcaattgacacttttccgcttgataatacgacgcgagtcactttttcgtaagcatgggaaagaccggactgctcatagacaggcttgaatcggctttcgctcagttcctgcacttcagataccgtattcgggttgcgcagcaagctcttcggcgtcatgatcacaagcgggcggatttcctcacgaagcagcattttcgcttgtcttcttaaaatgtggaaatactgagccgcacttgtcaggttggccactgtccagttgttttccgccgccagctgcaggaaccgctcgacgcggccgctggagtgttcagggccctgcccttcgtaaccgtgaggcagcagcatgaccagccctgatttttgtccccattttgcccgtcctgcagatatgaattgatcaaaatagacttgagccgcattggcaaagtccccgtactgcgcctcccacaacacaagcgtttcaggcgaatacacgttgtatccatattcaaagccgagaaccgatccttcagagagcgggctgttatgcaccgtaaatgaagaagcgcagtcgtctaagtgatggagagcaacaaattcttctcctgtttcgctgtcatgcagcacaaggtttctttgagcgaacgttccgcgctctgaatcctgcccggtcagccggatcggcgtgccgtctttcaaaatggaagcaaacgcaagcgattcagccaatgaccattcaactttacggtcatcatcaaacgcttttgcacgtctttccaggattcttttcagtttgccgaacacgttaaaggattccggccagttgataagttcgccattcagcttgcggagaacatcaaaatcaatggctgtgtcaacgtctggaaaaccgttggacaccggctccggcaattcaatttcccgtacggcgtcttcttttttggcgggcacctttttataggcgtcttcaattcgttttgtcactgccatttcgatgttttgcgctttttcctcgctgatcagtccttcacttacgagtttttccgcaaagatccgcttgacagtcgggtgttttctgacggcatcatacagcatcggctgtgtcgttgacggctcatccatttcattgtggccgtatcgtctgtacccgattaaatcgattaagaaatctttattgaaccgcttccggtattcaaccgcaaatttaacggctgacaggcatgcttccggatcatccgcgttgacgtgaacgatcggaatttcatagcccttcgccaaatcactggcatattttgtggatcgtgattcatcgctttcagttgtaaagccgatcatattattggcgatgatatgaatggccccgcccacctgatagcctttcagtgagcttaagttcagcgtctcggcgacaatgccttctcccgggaacgctgcgtcaccgtgaattaaaatggcgagcgattttgtttcgtcttgaaccgggtaccccttttgcgttcttgtttcctgtgccgcccgcgtgcttccttccacaatcggattgatgaattccaagtggctcgggttatttgcaagcgtaatccgcgcgcttttggtttcagcatcctgaagctgtctgtctgcaccgaggtggtatttaacatcgcccgtccagccgtagctgatgccggtcgatccttcagacggcacaaggtctttattcggcgcgtgctggaattctgagaaaataatctcatacggtttgccgagcacatgcgcaagcacatttaaacggcctctgtgcgccatcccgatattgacattggttgtgcccgccttcacagactgggcgataatgtcgtcaagaaccggcacaagcgcgtctaatccctcaattgagaaacgcttctgaccgacgaatgtccggtgtaaaaattgttcaaatccttctacttccgtcagtctttctaaaacggctgacagtttttccggtgaatttttccggaacagttcgccggattcgaccatttttgtaatccatgcgcgctcttcgaaatcatgcacatggtcaaactcgaaagagatggttcttttataggtattgcgtaaatgctggatggcttctaagccgtttgttatattggcaggtgcgtctttacagatgacagacgcgggtattgctttcatttcttcttctgtaagcccgtactcggataacggaaagagctcgctctttttcggatcctttctgagcggattgacggaagcgttcagatggccataggttcgaatatcttctgcaagtttaactgctgctgcgatcttttgaatcagatctgcggtgacgcgtccctgttcctttgtttccgatgcctcttttatttggcttggcggagcgcctagttcgtcaaacatgtctttcagatccggatcaatgctgtctggatcttcagcatattggtcgtacagctccagtgcgtagccgaggttcggtccgtaaaaatcttcccaattcattctttgtttcatattattttgaaacatttgaatattacccccaacctagataatcaagtgatcaattcactatcttgaaataacttttgaacgctgtgcccaaaattatgtaataaaaacgcttccaaggatattttaccactgattgcgtttggattctaccttgattgttcacaaaatagtaaaaaaaacagatcaataccgaaaaaattaaatcattttaaaataaaaagcgaaaaagcataggaaaaagcctatcctatgcttttatgaagcagttttttcaaaagcggatacagcacatcgggcagctgatcgacatccggaacaaaaatactgtactttccgtacatatcctgaatggttttcatctgggattcttctatcgcagtattggacagaaaaacatttatgacttctatccctttttttctcgcttcgatgacagcctcgctcgtatcgacgatgccgttttgttcgtatccgaatgctgccggctctccgtctgaaaacacgattaaaaatttttgcgcctcactccgccgcatcagctgtttcgtcatttgtctgatggcgtatccgtctctgttatcttcttcaggcgcaagctgcatgatcagcggacccgcagcctgcagcagcgactcttcgaacggaatgacggtattgaagaaattcggctggctcgtttcggtcgcttcgtttgtatcctcccaaaatccgacgatttggtgagggacggacactgatttcaaggcttcatgaaaaagaacgatccctctttttgtttcatccattttgtcaaacatgctggccgaacaatcgacaagcaatgtaaaaacggcgtcaatgtctgaagacgggtcctgctttttatagaaaaggcgcgggttccgttccgtaaaatagcggatcagtttgcgattcagccggcctgcgtgaaggtcggtccgcgggagcgtttttttgtgctcaagtgttttttgtatcatctgcttcaggcgtttttgatatgattctatcgtttttgcctgttctttataagactgctcctcttcaggagacgctttttgaggcgtttgataaaccgggaaggcaaatttgttttcttttccgtcagccagcccggcgccctcatgttcatcctgaatggattcaagcgcttccagtttagagtaatcctctcttttcgtctgacgtgcggaaccttgaacggagccgagcgcctggtcaccgtcatcgccttctctggccgcgtctttcccaagatctgatttcgcgccgtgctcaatatcaaattgaaggaagctttttgacggcgcttcggtttcccggtgccacgtattcattttctcttcaaggatttcttcatctccgtcggaagactcagggagcgtgagatcgtcacttaacgaaggcgctttttttacgctttcgaataaaggctcttcagccgctttttcgtaatcaagttccggcagaaaaaagtatgtgttcagcatatctttctcaagcacttcatcaaggccttccatgaggtcttccgttattgttgcgatttgttccgtagaatccgcctcatacacccggatgagctgacgttcaatatacggtatcatcatatcaatattttcatgcatggaaggaatgccttcaagcggagactcagccgtcagcttgacaaacatcgcgcaatacaaagcgtcggtgaaaatgctccgttctaaattcaatgtcagctgcgtcgtgaaatatttcctgtacatctccctccgcttctgaaaaacacgtttcgttcccggccgttcttttttgatctgctcttcaattctgatatcctcaagcagcataaacagctgcttggcaaagctttggcgggtgaagtgccggtgaacgtcatttaaaaaccccgcaaatacccgaaatgagctgctgcgtgttccgacagcgcgcaaatagacatcgcttttcaggccggcttccatatccccggctgatcggtctttccaaaagtggctcatgtaaattttcttttcaaagggattgtagtaagactgcacgccgtattccacttcaacttcactgcttctggtcagtgttttggccagatcagtcagcatcatgaacaaaaacgaatcaatcgtgctgtcgttaaatttgataaacttcattgtatatccctcattcgaacagcgtttctgcaatatttctgacagcggctttttccctgtcgtcgtcaagtttttccacgatgcctctttcaatcgcccgtttcggcgggatgtacgcagccaagtcgcacgtatctatgagagccctgatggacgccgcttcttctgacacttgtccgttatgcgcttgtgcgattaaatcagaagacagcgtcataaagcgctcaattaatttctcatcttttaagacagactgagaggtcagcacctgtttcaggaggcttcctttaatatacggaacatcaatgatgacaaaacggtttttaagggcttcgttcagcggaacggtgccgacgtagccttcattaatcgcggcgataacaccgaatccttcgcttgccttaatcacttctcctgtaaagggatttgtcatcatttttctgtaatcaagcacgccgtttagaatcggaagggtttcaggctttgccatattgatttcatcaatgtataaaaaatgtccctcgttcattgcggttgttacaggtccgggaacgaattcaattgtcgcctgcccctgttcattttcaatcgttttatagccgacaagcgcttctgcatcgaggtctacggagcagttgacgctgtgcatcggtttatgaaaatagttcgaaagcgtttccgccaattttgtttttcccgaacccgtcggtccttttaataagatattttttcccattgtcaaagcgatgacggcatcgaatacaatcgctttatcttcggcctcatagcctgatgatccgattaaatcccggaattcttgggaaacgggatgattttgataagcctgcagtttgttttgtatatcttccggaagtgataggtgctgtaattctgaagtcataggtgatgtttcctttccatttgtattccataaccgagtatactaaaaaagcccttgtatactcaatacaaaagggctcattccctgcgggcgctttttgtcaggggagcgcaggcgattctggctccggaatttccgctcgggtttgttaaataatcgtccgtatgttcatgaatgacgaacgcgcttccgtcccggtcgagcaggctgagtctgctcccttcttttaatgaagtttgcggcgcgttcataatgacatccactttaccgtcagcccccacttcaagattggggagatctccggcgtgatgacccatcggattgttgaagccgtgttctttgttcaaagggttgaacggaccgccggctgattcgaaatcaggtgcctgacatgtccctttttcataaatatgaaatccgagagaagcgccgggcggcagatgtcccgctgatatatgaatgtctgatccttcatcatcagattccctcacttcgatatatccgatcgtttttccgttttgattgatgagtccggcatgctcacggtatgcagatgcttccaatgcgcggctttccccatgttttttgggcggagcaggagcgggtctcgccccgcagccgcaaagcgtaattgatgcgagcatgagaaaaagcaagagacgattcatgcttcctcccccttatttttttacccatcagtcttgtcaaaacgtgaaaatggtaaacaaaaaaagccccgaaaggcttttttttaaaaataactgcgcgctcctaaataagcttttttccaatatggattgcttaagtttgaaatttcaaccccggaggagcttgcgtgaataaaatctcctccgcctaaatacattcccatatgagaagggcccgctttatatgtcgtaaagaagacaaagtcgcctgctgacggctggctgatatgtttcatcgtattccaatatccggccgtgctcagacgggaaacagagcttaccttatttaaaaggtaatagatgtaaccgctgcaatcgaagcccgcaggcgtattgcctccccagcggtaaggcacgccgacatgttttttcgcctcgcctatcattctgtcaatctttgaccctgtcaccggaggttcgggagtatttggcttgtttggctttgccggtttgttacccggctgccgcacaggatcttctgtttttcccgttccgttaatcaacagaacctgtccgatttgaagcacatcagttgtcagtttatttttttctctgatgagctgagcggtgatgccgaaccgattagcaattttccagagggaatcgcctgcttttactttgtaagtggatggcttctcagaagggtttgaatgagatggcggtgttgtgccgctgtttccgttatgtgaagaacctttgatctttaatacttgattcggatacagcatgtctgatgttaattgattcagctttttcagttcggcgatggtgatgccggtttgattggcgattttccacagcgagtcacccggcttcacagtgtaagtccctgatgcgcctttatcaggctttgtctgtctgccgcctccgtccgtgccgccggcagaccctttaattttcagtttttggcccggatagatgatatctgaactcaaacggttcaggcttctcagttcagaaacgctcattcggtattttttagcgatcacccataatgagtctccgtatgtaactgtgtaagcaccagtgtttcgttttcctttttgccccgttttatgtgtgccgctcccgtcgggaatgtgcagccgctgtcctgggtggagtatcgttgatttcagtttattttccgcctgcagggctgaaatacttgtatgatattgccgggaaagcttccaaagagagtcgccgctttttacttgaatggtttttgcttcagcgggatgcacggcgaaggttgaagtcattactgcagatacagccagtccggctgcgatttttttcttcatataacgaaaaacctcctatttatcattgctgaaagggacgttccttttctttggacgccgcctgttatgcaggattcattcagaagtcgacattaattccgattcatttggtcttagatcatcaccaatgccacacattttacataaattgagaacatttcacaaaagactttggaatcattttcataacatggcttttttccgcgacattccacctttcttgtctgtttttcatacaattctcttcacggcgtgaaaatcctcccgaaaaacaaacaaaaaaaagcccgcttcctataaaggaagcgggtgacggctgattacagaacccgggtctcggcagttttcacgtcttctgctatcaattccgctgcacgctgtgctccgccggccgctttcagggattctccgatttcagaagcttttgtctgatattcaggattttcgctcaattcttttattgcttcagtgagcagttccgctgttacatcttcttttttaaacatcttgcccgcgcccgtgttttccacttggcttccgacggcgaactgatctgctcccatcggaatgacgatcatcggggttttgtagtaaagcccttcgctcgtactgttcattccgccgtgagtgataaataagtccgctctcttcaggatctcaagctgcggaacataaggctttacaataacattctcaggaatttcatcaagctccgccggatcaagatgtttgccgattgacatgacggcttttccgttaaagttcctgaccgcttttaagcatttattaaacaattccttctgattgttaaaaatcgtgcccattgaaataaacaggactttttctccttcaagctggtcaaacgggaaatcctgagccgccggcctttcagttatggacggaccgacaaagagataagaatcgccaaactcttcttctttcggctgaaacgctcttgaagtaaatacgatggtttttctgccgtcatttgagaaaatatcatacggcgttttaatgtctgcgctgaattcttcattaagccggctgaccgcttcggtataagccggataatgagatgattcctctgatataaggtttgtatttgaaaacacttctttaataaatgcttcattcattgcaaatgttgtgcaaagtgaatatgccggcagtttcagcttatttctcacaagccttcctgccagaaaatgatgatcataaaggatgtagtcgtatgattcatcttttacttcctcaagaatacggagtgcggctttttcggaagtctcaatcattaacagtaaaaactcggtagcatcccgctgttcatcacccgttgcgttttttccgaattcatcttttcggaaatcttcacattcacggaattccgctccgcttgacgcgattttgtgctcatattccttcacgccgtaatatacgacatgttccccttttgccttcagttcttttacgacgcctaaagacggattgatatggccttctcccggaaagccgatcatcaatacatttgccatctttccactccctattcttttaaattttatgtatatttaaacgataacaccaatacagaaaaaggtaaagatgttcaccttattaatattaaatgggtacaatattcccattttcttattatttcgtatgaagcgcccgcggcgaaacaagcggatacagtccgccgtctttagcaaaagacatttttcccgtttcttctgaaacaacgagcacgagtgcatcagtcacggccgaaagtcccatcgcggccctgtggcgcgtcccgtatttgagatcgacatgttttgttgtgagcggaagcacattggctgctgatacaacccggttttctctgaccaatacggctccgtcatgaagcggattgccgggataaaaaatactctcaattaaagctgaactgatctcggcatgcaggctggtccctttttgtatcattccgtccagcggatctgcacgttcaatcacaatcagcgctccgtgcttttcttccgccagatgctgcacggccctcgccagctctgtataggaaggcgtaaaatgttcgatatatgactgcaggtaaaacgacgaagcgacagcctgcatttcctgaaacgtatgtcccagttcatctaattcgcaaagaaggcattggtctttttcatccaatgtccgcagtatcattccggcatcctcggtaatttgtttcaagtacgtttgaacggcagcggtaaacgcgctttccgtcatttgagtgtggcgcatgtcacatcatctcctttcccttattttctgcatcgcgcgcatggatatgcgccgctgtgtacaccataatcatgaaaggaggcgaaatcatatggaatttgcacggctgatgcaatatatctgcacctttttaggggtcatttcactttcattcatttatgccaagatgtttaaaaagccgaaaccggataaaaaagagtaggccggctttcattgctttttatacataaaatgttataatttctctcgttaaaataaagaaacggggaacctaaattgagagaaacgaacacgatcggccaaaaggtcagacagctgttacatatcttcattccgattttaatcacacaggcgggccttgccctgatcacctttttggacacggtgatgtcagggaaagtgagcgccgccgatttagccggtgttgcaatcggttcaagcctgtggacgccggtgtatacgggccttgcaggaatattaatggccgttacgcccgttgtttcgcagctgtttggagccggcagacaaaaggaagtgccgttttccgtcatccaggccgtttatgtagcggccattctcagtgcggcggttatcctggtcggctttttcaccgttgatatgatcttgggacatttgggcctggaacctcgtgtccggacgatcgccaaacactttttaggctttttatccctcggtatttttcctttgtttgtgtacgccgttttgcgctcgttcattgacgcactcggcaaaacgcgagtcacgatgcttattacgctttgctcattgcctattaattttgttttaaattatgtatttattttcgggaaattcaacatgccggcattgggcggagtcggtgcggggctcgcttccgccctgacttactggtgtatttgcgccgtcagcttttttatcgtcttcagatttgagccgtttgccgggtactctgtatttcggaaactgtaccgtttttctccgtctgaatgcagaaaacttttgaaaatcggtttgcctatcggttttgcggtattttttgaaacgagcatttttgcggctgtcacacttctaatgagccatttccggacggtgacgattgcatcccaccaggcggcaatgaattttgcttccctcttgtatatgctgccgctcagcgtatccatggccatgacgattttagtcggctttgaagcaggcgcaaagcgttacagggatgcccggtcatacagctatatcggcattgtgatggccctttgtttttctttatgcacggcggctttcattttactgttcaggccgcaaatcgccggaatgtatacatcagatccggaggtgctcatgttgacgcagcactttttaatctatgcgctgtttttccagctttctgatgccgtagcagctccgatacaaggcgccctgagaggatataaggatgtcaactatacactcggtgcggcttttgtttcgtattggattatcgggcttccgctcggttacgcagtcggcacttacacgagcctcggggcatacggctactggatcgggttaattgcaggacttgccgcaggagctgtcggtttattcttcagactgatgaagctgcaaaagcgttatgtgaaaaaaatgatgattttataaaggaggagcagcaatgccgaaacataaactgctgtacgattatttaaccgaacgggcggaggatatcagtcagacatggtttgatacccttcatgatacggatcctgattctgtttatgcttctactgacccggctgttctcacaaatctgaaaaaacaaaatctggcgtttaattatcaactcaatcggattttttctgaagagaaggaagtatatacagcggcattggaaaagtgggcgtttgaagccgcacgggataaagaacatttaaaaactcccatccattacatcattcgcgagtttatcagagttcgtgatttgtatgtcggccatgtaaagcagtttaccagacttcattcagacaccgtgacagaagaagatgccgaagatatattccatacgctgattaaatcgtttgatgtggtcattcatattttcatagaggaaatgtataaaaacacaaacattcagcttgaagcgcaaaaagaattgattacagagctgagctcgccggtaattgtgctttttgacaatgtcggactgctgccgctgatcggggatattgacacggcaagagccaaaatgattttggagaatacgctgcaccagtgttcagagaagcgcatcacgcagctgtacattgatttatcaggcgtagccatgattgatacgatggttgcccaacagcttttcaccttaattgaatcactcggaatgctcggcgtgaaagcgacgttatccggaatccgtcctgaaatcgcccaaaccgcggtgcagctcggactgagtttttcaaatttatcaatacggtcttcgcttgcggaagcgatcgcttccgatctgacacaaaaaaagggataaggcatttcagccttatccctttttttatcagtctttccacggatatgtccaatacacttcttcttcaaaccatgtctgaagaaccggctcgttattttttaatttttcttccagctctctcagcatgccttccgtttgggtgcggtgcgcttttaaggcattcattttaatatcggcaacctctttaatatcaagaatgacatcaggcttgccgacggcttcctccctgttgcgggtgattgccatgcaaagcgtgcgcgggcggtcctcttttttctttctgtaaagcgctctgatgaccgcttcgccgcatgcatcatgatccggatggacgccgtgctccggatagaatgtgacaatcagactcggttttacatcgtcgataatctcttccatcatatccgcgagccactcgtcatcttcaaattcaagtgttttatcacgaagcccgagcattctcaggtcagtaatgtccattgctttgcatgcgtcaatcagctcttgctttcttaacagcggcagtgtttcacggttcgcgaaaaagggatctcccatgttccggcccatttcgccaagcgttgcgcatgcatacgtaacgggaatatctttttgtctgtgtaaagcaatcagtcctgccactccgtatgattcatcatcagggtgaggcaggatgacgagtacatgttctttcatgattttcacccttttctttaaactgtaaacggcttttcgctgatttgaagcgaaatcgccaattttccgcccggcagatgccccgccattaacaaacggtcttcttcatctactgtatactcagtcaaaccttctgcgtaaatccagccctcttctgttttcaaaccgacgcggtacgggccgtttcctttgattttcgcctgatggtacgtcacttttgcattgcgtatataggctacaaccgtcatatttttctcattcagatgcgctgaataagaaccggtcgttgtttccaaatggatatatacaggacgatcggcatatcgctctaaagaagtttgcacatcttcttttatgatcgctttcatagctgctcccctctttcttcttttaaaaattgcaaacgcttcgtatgtagttcaaccaattcatatttctcaatcggccgcagccgggaatctacaattcgctgcaccgccagagcaaacttttcctcgggtgacttccggagcctcggatgtgttctttgatcaagcagttcaagatcaatcgccttttccgcttcttcaagggttgaagccgggagagtgcggttattccacagtgcctgataggcttttgctatgtctttatcagtgcccattgtacagctcctttacatactcgtaatgattatacataatttaagctatcgctggaaagcgaaaggcttagcggctttttatcggccgcttccattttatctgtgaaaaggtaaacaaaagcaatgctgcccatatacaaatgaaggtaaacgctttttgcccggaaaacggttcatgatacacaaatacgccaagcataagggtgatggtcggcgctatatattgcaaaatgccgacttgatacagcggcagacgctttgccccctctgcaaacaataacagcggcagggccgtaaatacgcctgcgaaaaataggagcgcccatgttcctgcccccaaggacccaaaagtgctcccgtcagctgtatatcctaaataaataagtgcagccggggtaatcaaaagcgtctccagcgtcagtccgatcgtgctggacatgcgggttctttttttacataagccgtacagaccgaagctgaatgcaagcagcaatgcgatataaggaaccgcgccatattgaaacgcagatatgagcacggccgccccggcaatagaaacggctgctgtttgcatcttgttaagcttttcttttaagaataggatgcccaaaagaacggaaacgagcggattaatgtagtacccgagacttgcttcaagcaaaaagccgtgattgacggcccatatgtacacaaaccaattaacggaaattaaaacggaagcgaaaaaaagcgccagcaggcccccttccgatttcaaaagacgcagttcacgccatccggttttccacttcttaagcacagttaaaagcacacacatgaaaacaaatgaccataaaatccggtgagctaaaatgtccaatgcgggtatttgttcaagaagtttccaatagaccggaaacagcccccacatgacgaaagaacaagcggtataaatgattccttttcttacgttattcccttgcacggccttccccttcctttctgtaaacagattatattatatcacgggaagcttccggcgggcatatactatgttgtccgttaagaaagggtgagatgccgtgtttgattggaacagatattttcccttccaaaatcagttctctaaagaaacgtttaaaaatgctgatccgaaagatgtcgagacatatgtcaaccgagtgatggaaagcgtattcggcgccggttatgccggacagttcccttttcgcgacccgatgtccaaaaaggccgatccggtcgaagcggaaccgcccaagccggaaattgacctgtttgaaacatccgatcatgtttttgcgaaaattcccgccgaacaagaggaactcgaccgtatcaggattaagcatacgtcacacagcctcgttgtagagaacagcagcctgggagaaggaaaaaaagaaatcgtacttccgagcctcgtcaaacggaaaggaacaaaagcagtctataaagacgggatgattgaagttatgttttcaaaacaggaagactacaatctatcggaagtggagattttaagataaaaaaacggcccgcgcgatgcaggccgttttttcttaataaaatggcggataaccgccggctcccggcccgaaaccgccgtatgggacgcctccgtatccgtaaccggcaaacccgtacggatagcggggtcttgtaaaacctgtggcaatcacgcctccgagaagaccgcctaaaaatccgccgaataaaggagcgccgaacaaaaaaggacttctcgccggaaatccggcaggaccgaaattcccgcgatacaatgcatgacgagggtacatgtttttcctcctttatgtctgcctattcttaagcgtattcataaaatgaggaaattgattgggcgattgtaacaacatgtgcctctctttaatattgcattaatatgtaaacattttggttataatttgattatattttgattaactgttatactttttttacaagttacgatattataaaaccatcagggggaataaaatatgccattacttcgttttgacgttattgaaggccgggatgacgcagcattaaaaaagttactggataccgcccattacgccatggttaaagcttttgacgtcccagtaacggaccgttatcagatcgttcaccagcatcggcctcatgagcttatcattgaagataccgggctcggtttcaaaagaagcaaagctcttgtcatcatcagcattgtcagcaaagcgcgcaccgaacatcagaaagaaacgttatatcaactgatggctgatcagcttaaaacagaatgcggcatatcacccgaggacgtcatgatttccgttacagaaaacgggaacgccgattggagcttcgggctcggtgaggctcagtttttaaccgggaaactgtaaaaggcctccctgcttgttttggatgttttcaaactgaataaaagagggatggatgttggttagtgagttgtatccttgtttgatatgcggatttaaaggattagagacaagtcccgtttataacggcgaatatcaaaaaacatttgatatctgcccttgctgcgggtttgaattcggctacagtgaggaccatgacgtaagcttagggtttattgtaacgcctgatcatttaattgaagcggcatttcagttataccggaaacagtggattgagggaggaatggaactattttctccagatgatgttccggcggaatgtaaaaatgatcatttccttacattcgatgctttattaaatcaattaaaaggcttgaacctcaatctgaacaattttgatattaatggtttttatgacgattaaacattatcattaagaaaaggctgccttgggcagcctttattattcatcacatgtgtcgttggcagatcccccgggctcgcaaaaactgtctgcccatttttgcatttcctgaaaaacggcttgcagtgccatgcctttatcagtcagtttataaatgactttgacaggtgtttctggcagcacctgacgctcgacgatttcattttgttccagctctttgagccgctccgcgagcattttttgactgattgtcggtatcgtttcggtcatatctttaaatcgtttcggcccgtccatcagtacatggataatgaggccgttccagcgttttcccaaaagagaaaaagcggattccattttaggacacattgtatatcccacgtgaattcatcccttcatctatgaattgacaagttttttgtgatccattaaaattagttttcaagttacatttagtaagcttctaacttttctattatgataacacgtttatccgaaggaggaaacatgatgacatccgtattagacgttttaaaggaacgcgcatctgttaaagaatacgataaagacgcggtcattacaaaagaggaattgacagaactccttgaaatcacaacgcaagcgccttccgcctggaaccttcagcattggcattttcaagtttttcacagtgatgaagcaaaagctgccctgcttccggttgcttttaatcaaaaacagattattgattcatcagcagttattgccgtattaggcgacttaaaagcaaatgaaaatggtgaagacgtttatgctgaactggctgagcaaggcaatatcacagaagagattaaacaaacgcttttaggccagattaacggtgcataccaaaatgatcagtttgcccgcgattcagcatttttaaacgcttctttagcagcgatgcagctgatgcttgccgctaaagcaaaaggctacgacacttgcgcgatcggcggattcaataaagagcaattcgttaaagaattcgacgtgagcgagcgtttcgtgcccgtcatgctgatttcaatcggtaaagccgttaagccggcgcataaaagcaaccggctgcctgtatctaaagtgtcaacttggctgtaagatgaaagaaacccttagtccgcttaagcagactaagggttttttataggaatcgctcactgtaccaggctcgtgcctgctcggcttcctgctgtgtgagctgatgaccgccctcctgccattcaagagcaacggatgcatgagcatctgtcagatactgataaagctcctccgattcttcttttgtacataggggatcgcgttttcccgcaccgataaacacaggcagcccttccatatcaggcagcttcactccgcgtatcggcaccatcggatgatgcagaaccgctcctttcagtacatctttataatgaaacaaaagacttgctgcaatattggcgccgtttgaatagccggcagcaatcacgttttctctgctgaacccgtacatttgcgccgcttcatcaataaaattctttaattcttccgtccgttcaattaaatctttctcgtcaaataccccttctttcagccgcttaaaaaaacggggcatgccgttttccgacactgatcctctgacccccagcagacttgcgttcggatcgataaaacgtccgagcgacagaagatcatgttcatttcctcccgttccgtgcaaaagcagcagaacattttctgacgttccctgttcaaacacatgtttcatcatcattctcctttctccattatgggcagaacagctgtaatctgactgcgatgctcttccagccattccggaagcttcagctctgttccgagattttcaaaggattcatccgtcataaagcccggttcgtcagttgccatttcaaataaaatgccgccgctttctctgaaatagattgaagtaaagtatgacctgtcaagaatgtcagatgaagcaagatgagaatcagcaagaatatccttccactccgcctgctctttttcgctcgtgcggaaagcgacatgatgaactgtcccgtaaccgccggcacctgcttctttcggcgcaaggtcaacatctataatatgtccgatccttgcctccgattgcagcctgacaatttgattttcttctcctgtctttgaataaccgaagcgttctatgagaaattgaatggttgcttcaggacggtacgagtacagaagaacacctctcatgcctgtgatcgcttctttttcagtaatgcccgaaggagtccattcactctgtccgcttctttcatcttccattatggcaagcggcaggtcttctgtatcattaaagagaaggacttgttcagacagcatgatctgttcttttacagacaagccgttttcttcaagccggcgcttccaaaacgcgagtgctcctttcggcacggagaaataaattcttccggcctgcccttttcccacggttcccgggcggcttccctgaaaaggaaaaaatgtaatgatcgtgcccggctctccgttttggttgccgaaataaaagtgataagtggccgggtcgtcaaaattaacggtttttttaacgagccgcaaacccagcacttcagtataaaaccgaagattttcagcaggatcttttgcaaatgcggtaacatggtgcaatccttgtgtattcaatgtattcactcctaaatatcttgatttcgagatattaactattctaatttaatatgaatgaagatgcaactaaagtgtttcagttaaaaaagtaatagaattcttttttttctgaaaaatatcttgtgatcttatctgacacctgctatgataaggagcattatcaagtttcaggaggaaagtaaatggtcagaaaagcactaattttcgttctcatcttaatccctttcagccagctggccctgctgtcagtcgctaatcgggttcatccgatcattatcgggctgcccttttttcatttctggctgcttttatggatcgcagtcactccattatgttcgtttcttatttataggctgcagaagaaacaaggaggactggactgatgcccgcaaatataacagcattgatcattacagccgtcatcgttttaaccgttgtctgtatcggctttatagccggaagagacaaatcatcacgtacttctgttgaggaatggtctgtcggcggcagacggttcggggggctcctcgtctggtttttagtcggcgcggatctctatacggcttatacgtttttaggcttaacaagcacagcctacacagggggaagcgttgctttttttgcaatcccgtattctgttttggcgtattttatcgcttatttctttctgccgaaattgtggaaagtggcaaaaattcacaaattaacgacgcttgccgattatgcccgtgagcgttttgacagtaaacttttggccagtcttgtcgccattgtcggcgttcttatgctcattccttatatttgtctccagctgagcgggattcaagatacgcttcaggtggccggaacgggtgtcattaatgtcaatatggtcgtcatcatctcttttattcttgtagcgctgtatacttttttcagcggaattaaagggccgacgtttacggcgattattaaagacattctggtgtgggtgattatgctgtttatggtcgtctcactcccgctgatccattttcacggctggacgccgatgattcacactttggctgaaaaagcgccgcaaatgctgacgataccggactcggggccgaaaggaattccttggtttatcacagcttccatcgtatctgcgctggcgctctttatgtgggcgcatgcggcaaccggtgtatttacggcaaaaagcgcagatgccgtccgcaaaaacagcatgtttctgccgctttataatattgttttgattcttgttatttttctcggctttatcgcgtttcttgtccttccggaagataccaatccgcggctcgctttattgaagctgattcaaacgtcttacggcggagtcgcacagggatttgcttactccacgatcgcccttgcgtcattgattccctgctctatcatggccatcggagcatcaaacttatttgcgaataacttatatcgggatttgattcacccgaatgtgtcaccaagcaagctgacgatgatcacccgttcaatggtatttgtcgtcatcgggctcgcgcttttattcggtatgctgttcccgactgcgctcgttacccttcagcttctcggtgtttccggcatggttcagatctttccggctatcgccgtcagtctgttttggaagaatcaaacgaaagaagcgacaattatcggtcttctcgtcggtcttatcgtgacattcacggtaaatatcacccaatccgcccacggtatatatgaagggttttgggggttgaccgctaacatggctgccgttattatccttaacccgttttttgtaaaaaaagcgtcttcaaacgccgtcaaagacggtttattcaataaagcgccctctgataaactgaaccaaaaaggcgcttaacagaaaaaagccggcacatcgatgtgccggcttttttactttttgtgctgccatttgtaggtggcgacggttttagccgggatgacggcttcaaactgccgattttctgaaacgacatggaatttttgttctgaagatgtctggttgattacgactgtcacaatggattgatcaggattaaggaacgatacattcgagactgtgtttttggagccgtaattactttctatccgtttggctccgcgctcgataaattttgaaaagttgcctgtcatatgaaagatcgggatattccaatagcggtcagggtttttagcatcctgaataaacagcgtcgggtccggggtgcctatccaatgatgcgtcttaatttgactgtcgagcatcgtcacccacgcattgtagctcgacgcgccgttgcggaaatactgtgcgatccgatccgcccctgccgtcccccagacagaccgctccgttaagtgaatagattgatcaggatatctctttccgatttccgacatgacggaaaggtcaccgtcataatcgtgaaaagcgatgccgtctgccgcccggtttccttttttatcatctaaaatcggcggaatatagttccacgccccgctcgcattgtgatcataaatccaaattttcgtgtcaattatgtgttttttcaattcttttttcacggctatcgccagtttgcgctcctgagacggcggcatgtacatgctcggatagtcgatttccagcaaaggttcattttgaagggtcatcgcataaatcggaattccctgcttttcgtacgcctcaataaatttgcggaagtaaacggccagtgcgccgatatatttatctttcagctttccccgcttgaggttttcattcgttttcatccaagccggcgggctccacggtgaggcaatgattttcagttccggatttatcgccagcgcttccttgatggttgctgtaatgtgtaaatcaatatccttttggatcgagaaatgacggagcttaggatctgtttggccttcaggcatatcgtcatacgtataaaattcctgtgccgtaaaatcagatgtcccgatcgttatgcgcataacgtccatgccgataccatctttgggatcaaccagttttttcagcacttcttttctttttgcgggtgtcatttttgataaattatggattgtggattcttccagggacgatcctacgcccaacacactttgatagcggcgcgacggatcaatatacacggcggcggagtcagaagccttcttttttgtccatgtaagcggtgtttgttcgtctaaggcgtatttcacttccagcggcccgtcataccacgtacgggaagccggatctttttcagaactgaaccacacccttactttgtttttgtctgaagccttccgatcagccgcatacacttcggcttccgtgctgcttgatatgaaaaagaaaaacataagaaaaaccagggtcatgtgcagactttttttaaaaaacatgaaccaccatccctttccttatttttataagcgattctaaatgaaaagccggacagtcacctccttcccgttttaatgaatgcgctttcataattactgataaaaagccggcttcacacaacggtgaagccttccctttttacacctttaggatacatatgcgccgtttgtttcaatcacttttttataccattcaaatgagtctttcttaagccgcttcattgaaccgttgccttcattatcccgatcaacataaatcatgccgtagcgttttttcatttctccggttgtaaatgacacaatatcaataattccccatggtgtatagcccattacatccacgccatcatatgtgactgctttttccaaagcttttatatgtgacgataaatattcaattcttgaagcgtcatgaattgaaccgtcctcttctaatgtgtcaatggcgccgaatccgttttccacgataaataatggaatctggtagcggtcgtataagcggtttaatgtgtaccgtaaaccggtcgggtcaatcgcccagccccaatcactcgctgtaatataaggattttccacgccgtttggcaatcctccgtttaccacatccccggtattatcgtttatcacgtcactttttacggtagtggacatgtaatagctgaatccgaggtagtccactcggccatttttcaaaatctcttcatcaccgtcttcaaagtgtatctgatagccttctctttcaaattcttttaacgcatagcttggataatatccgcgaacctggacgtccgggaagaaaaagcgctgtctcatcgtttcttcagccagcatcacatcatcggggtgagatgagtacgggtaaatcgggacatgtgataccatcgcgccgatcctgaactcaggattgatttctcttcccttcgaaacagccaatgcgcttgccagcagttcgtgatggccggcctgatacatgacttcttttgcgttttcgttttctttaacggcgacgcccgagttcgtccataaaaagatcggattattcacatccatcttattattgatttcattaaacgtcatccaatatttcaccttatgtttatagcgttcaaaacacacttcagcgaatttcacaaaaaatccgactgtttttctgtttctgaaaccgccgtattccctcgccaaatgcagcggcatctcaaaatgtgacaaggtaattaccggttcaatcccatgtttcagcaattcatcaaacacccggtcgtaaaaagccaacccttcctcattgggctccgcttcatcacctttaggaaaaattctgctccagccgatggacgttcttaaacatttcaggcccagctcgctgaataatgcgatgtcctctttataacgatgataaaaatcgatcgcttcatgattcggataaaattcccgctcttcaattgtatctgttattttccggggcacaccatgcgcgcctgccgtcatgacgtccactacactcggccccttgccgcctttattccatcccccttcaaattggtgggcggccagagcgcctccccataaaaaatcttttggcaatgtccccatcgtttatatcctcctttatttgactgccgcttgcataccgaataaatgcactgcagcagcttcaagcaccgcttcgcaggtgtagaagaattcctgccttcattttcatattatacgtttacattataattgtaccggtataatttatcaatacataaacaattatagttaatttacgaaatggcttttaaaaacgattatgctataattctgaaagaagcgggacaataaatgaatgaggaatggatatgttaaaataccagcaaatcgcgatagatattgaaaaatacatagaagaacatcagctgcagcaaggggataaactgcctgtgctgcaaaccttaatgacccggtttaacgtgagcaaaagcacgataaccaagtccttagatttattagaaaaaaaggggattgtgtttcaagtgaggggaagcggcatttttgtcagacggaataaaagaaaagggtatatcagtctgctttctaatcagggatttaaagaatcacttgaagattttaatgtcacttccaaattattagcgctggaagtgagaaaacccacgcctgaggctgctcaaaatctgaatatgccgcctgacggcgacgtgtattatgtcaagcgaatccgatatattgacgggctgacattgtgtatcgaagagtcattttacaacaaatccattattacgtatttgaataaagagatcgtggcagaatccatatttgattatattagagacggtctcgggttaaagcgcggtttttcagatttatatctgtacgcggggatgttaaatgaggaagaagcggagtacttaggtctgtttacaggagcgcctaagctttgcgttgaaacgatttttcatttaaccaacggccagccgtttgatttctcaaaagtcacctatcactatgagcaatcacagtttttcattcaggcgaacagccacctttttgaacaggaaacgacataagacgggcttttcgcaaacaaaaaacaccccatgcgcgagcgacgcatcgggtgttttttactatttcatattcttatttaatgtttcaacggcttttttcatttgtgtatcgttgtccgcaagctgtttttgcagatccgtcatcagttttgccgttgtgtctcccgttaaaatacctgtttgtttcagcttctcttttgcttggaattgtttgactgcttgttcaaatgctttatcatacgtgccgtttacattcacgctgtaccccagcgctttcagcattttttgcgcattggtgacggtcgttccggaatccccgtatttgtatgtttttttcgcatctaaatacggcaggttcgcatattcaggaagcttaacctgatattgcggtttgatgccttttttatgaatccactctccgtccgctgtcagccattttgcgattgtcagtttaacggtagaaccgtcgctgtaatcttttgccgtctgcacggttccttttccgaacgttttctcgccgatcagcggaattccggatgattcatgcagcgcagccgacatgatttccgcggcgctcgcggtgccgtcattgacgaggacgactgtcggttttgtcactttgcgctctttcgtcgctttcatgacttctttcgtgccgtctttgtattcgacctgcatgatatttttccctttatcgataaacatgttgctcattttgatggcttcatccatcaggccgcccgggttgccccttaaatcgagaatgtatcctttcgctccttgtttttcgaggctgtcaatggctgaattcagctcttttgccgtcgattcggagaaggatgtgatttggatttcgccgatgtctccttttttcatttcagagtacaccgtttcaaccgggatggtgtcacgtttgatcgacaggttcagatcgccgacacccgctctgtgcagcacaagcttgacgtttgttccctttttgccgcggattaatgcgacggcttcgtttacattaaggcctttaacgcttttgccgttgaccttcaagatctggtcattcggtttaacccccgctttttccgcgggtgaccctttaatcggcgatacgatcaggatgctgccgtccttttcttccacttgtgcgccgatgccttcaaacgaagcggaaattgtttcttcaaacgactttccttcctgaggatccatataagaagaatacggatcatccagggaactgatcatgccttttatcgctccgtctactaatttgctgtcatctgttttttgatagtaatcacttttaatctgctcataggctttattgaatttctcaaatttgctgttcgtcaaagcagccgagccttgtccgaaaatggtcgtattgcccgtgataaacagcgtaagcgctgaggctgcgaccgcagtgatcaatataataaaaaacagtttaaattgccgcttcaagaaaacaccacctttttattcttacattattatcatagacgaacgctcattcgtcaacttcaaacgtgaggcgcccttctttcccgtttacccaaacctatgcttttctctcaacatatgctgaggaaaaaaggaggattcggcctttgagcaaatatttagaaatgctgtccttattcggagtcggaggggctcaccccggcgggctcgctttttccaaagccgttctcacaaaagcggctcctcctcctggcgaaccgattcttgacgccggctgcggaacgggacagacggccgcttatctcggccacctgctgtatcccgtcacctgtgtggataaggatccccttatgcttgaaaaagcagcaaaacgatttgccgctgaaggcttaaccattccgggctatttagcggagcttgagcggctgccgtttgctgaaaatcaattttccgccgttctttccgaatcagttctcaccttttcaaatcttgattcatcgctgtctgaaatcctgcgggtccttaaacccgggggcatgctgatcggcattgaagctgctttacaaaagcccatgccggaaaacgccatcacgcagataaaagacttctacggttttaccgtattgcaggatgaaaccgcatggaaacagagattgcttcagcaaggctttcagaaagcggatttcattcccgctgtctatgaaaacaatgcgcaggagccgactacagaaatggatttatcgcccgttattcagccggttcactacgatacgctgacggctcattacgagcttatgcagacgtaccgtgaatatatgggacactgcgcttttgtcgcttacaagtaaaacggcaattgtcctcctgttttcgtccaacctttttaccgcactctatcataagctgacatagaaagataggttggataggaggagaaaagatgcaaaactattatcatctttgccggcagcaccaaggaaaagtagcaagaattacagaacgaaacggcagagtccacgtcggaagaatcgtacgggtgactaacagcaaagtgtatatcacccctgtcggcggccgtcacagagggtacggattcggttattggggaggaggctggggaggctggggagcagcctacggtatcggccttggtttcattaccggatttgcgcttggaggtctgctcttctggtaataaagaaagcccgctttctatttttcaagcgggcttcttctcattacactttctttacttcattaaaatattcttcaagcgttaattgatggtcatggatggcttttgccgcttttttgcctacatagcgtaaatgccatggttcatactcatactttgtaacattttctttgcctttaggatagcggatgataaagccgtattcatacgcatggtctttcacccatttgccgtccgccgtgtttccgaacgcctcattcagctcatatccgttgcttttgctggaaatgtccatggcaagccccgtctggtgttcgctttgccccggatatgcgacggcttctttcgcctttttttcacctttcagactgacttcattatcgaaaataactttctgtctgtcataagaacggtatcctgaaacggcaaccaggtcataaccttcttttttcccggcgctgaatagttccgccaaagcatcggcggcaggtttgcggatatatcgtttctcgattttctcagtaaaagaaaattcgactttcgggattacgagatcattcggtttataatctcccggcagcgtatatgtcttatttacgagcgcaagtgtatttgtcgggttttgaatggtctcaagcccgttcacttctttaatatcattaaaatatttgctctctaatacaaaatcactgttttctgtcttcgttgtttttttgcttgatgtgtcatctgattgttttgtttcagctgctgtttttgtgtccttatggctgtcgccgtctgaaatgctgcagccggtgcccacgattgcggttacgctgagagcggcagcgagcgagaaccatttagtggatttcttcattttacccttacctttctttttttgaatcagggcgatgcataaagaagagggctgctttaatcagcataaccctcatctcaagtttacgatacagtatgcagcgccagtttaatcatatcatgaaaagtcgtttgacgctcttctgccgttgtttcttctcccgttaatacgtgatcgcttacagtcaggatagacagcgcttttttgccgtatttagcggcaagcgtatataaagcagtcgtttccatctctacgccgaggacgccgtatctggcaagcttttcgatttgggagtcttcattgtaaaactgatcggcggtgaatacgcttccgaccgctacgggaagattgtttttttgcgcttcctggtacgctttatgaagcagttcgaagtctgcgcaaggagcataatctacactgccgaaggcgacacggttcatctgtgaatccgttgaagacgtcatagccaaaatcacgtcacgcactttcacgtcattacggatggctccgcatgagccgactctgattaagttttgaacatcatagctttgaatcagttcattcacataaatagagatagacggaacacccatgccggtgccttgaactgatacttttttgccgttatatgtacccgtaaatccgtacattcctctgacttcattatagcattccacattttcaagatacgtttccgcaataaatttcgctcggagcggatctcccggcaaaagcactgtatccgcaatttggcctttttctgcgtttatatgtacactcatttccttttcctcctgcctattcaaactcccacccattgtacactgaataacggtaagagacaatcatcagcattgatcagggcaatcttgggcagaatatgcgggatgacaagcctaaagaaaaaggagtgaacataatgggcaaaaaacagcgcaaccgggtgaccggccagaaaaagaacaatcacgtgcccgtttcagacgtcattgcagctgatgaagcgcatggaaaagagcattccgccgctaaacggaagccttaacactgtctttcccagacaatacggaagccggctgaatcttcagccggctccgtcttacctcggctggacgagcagccggttaattttactccatcccgcagggttaagcctgtaataggtctttccttttcttccttcgtctatgagtatgacgtctccggtcgctatgaatctggcttgatagtcgtttgggaccgtatcaggcacattaaaaacagaaaatgccctttccagtgcgtcttgatgattgtcagcggccagctctgtccgatagacgaccctgtatccctttttctcgccgtagcggggtgtttgaaaaatcgtcacatcataggcacaagtcttttttttaaacacgggcagcgataacagcatcaagatccctccctcttatttcttaatagtattagcgttttttctcatttttcctgtctctatttttgtcgaaacggatgatacttttcgtcaaagagcgcaaaaagcgaaacgaggcaaagtccgagactgaatccggcaaggacatccgtcggaaaatgcgcgcccaaataaattctgctgaatccgatcagaatgacgagaactccggtaaagacggtgagggccctctttcttttcgtgaaaaacggaacatgcttgatcaaaaagtaagcgatgacgggatacatcactgccgaattcatggagtggccgctcggaaaactgtatgaggtttcatggacgagcggttcaaaagcgggtctggctctttcaatcaattcttttatttttatgtttacaatccgttcaatgagaaagagaagcggcaaaaaaacaacatccggcgtttttttgtacatatacagagctgcgcctgtcaaaagaagaagcggcaaaagcaccgcggtcgtgccgagctccgttatccataacatcaattcattcagccagacagacctgatcctgacagccgcttctatcacacgctcatcaaaagcccggacggcttctatccggatcgctgctgcgagcagaataaacaatgcgaaaagacttgctggcttgtacaacgttttccccccatgtttcattctcccgagctgattgaaaaaaccgaagctttttcacttcggttccgcagtttcagtcttcatcaagctcttcgtctatcatacatttttctaataaataatcaaaggtgatgtcggctatttcgaagatttcctcttcactcggtatgtacccgcgcatagcaagctgactgtaaaaataatcagctatttcttctgtgtcaatcacaagatctatttctttcatgcaaacaccgcctccttttttatgttttatgaaaaaaccgttcaaattatacccgaaagttctaaacgttttgtccgctcatatacttttaaaaaaacaagccccggagggagaaaagataatgacgaaaatgatggctttattggacggagatggatttgatatcgtattggaaaaagtgctgaaaggaatgtcgtttgtcatctttgccggctgtctgccctggtttttatatgtcaccgtccgtttttttgccggctagctgaaatgctcccgcaggctttccagcacaaaattcatcatatctttatattcttcgtcaccgaacaaatgataaagaatcttataatcgttataaatatcaagcagctcatctacaatcgataccgccagcacatgcagggcatcgggatcatcagcatcgccttcaaactgaagaagagcagacgcgacggtatcctcgccgatctcatgagatgcttccccaacatagtggacaaacagcagctgatgcacaaactgatccatttcatattttctcagaaccagcgtgagatcctcttcctccgtttcaagccactctccgtctttcagccgagtcagctcataaataatatcctcccagccatcctctaaatatctccatatttcagttctgtgaccgataactcggaataattcctttccgtagtcctttacatatacgacgtcgccgatcagaaattcatattcaatatctaatttttccatatcgacgatcacgccctcataatctttataaagctggatggacgattcaaaataaagcacttcattatgattgacttcataaagataatgtttatcaatttgatgaaccttcgtaatggtgccgacggttccgtacatcacgacgaccacgatgtctcccacttgaaatttcggtttatctggcttcatgctgtctcccccttgccgcggactgtcatacgctatcgtatgccggccgccataatttcgcatgggcatgaaaaccacaggaaatatctatttctgcacctgttcaaaatggcaaaaaccccaacatgcttgtgcgttttttcacttaccgtaacagaagcgtctgatggcattgcgctctcgatcgaatgagcagtaacaatgacgagacaaaaagcgcctgtttttgaatgagtttttgtttatttctccatgacacaaagataaatacccggcccgaaggcatgttgacaatatcaccgccgtgatgttcaaaatttgccgtgaaacacatcatcgaagatgtatggagatccaattccggctgcatatctgcaatggcttgtttatcatgaagaaccaaactcgtttcggctttcaatgaagccacaacttcaatccgcttcaaccttgtcacataaaattcccttttccgtccaaacgtcagtgcctcaccatagatcatttgattcctctcacttcatttaaatgtttgattatttctccgtgaaaagaggctccttacacgggaccccgccggcagcaggtctgatccggtgaactctgcagctatacattctgctgccttatgatccgtgccatcaggaagacttgtttacgcgctgatcaaaacgaaaggcattgcgggatttgatcatacggcacctcataagcgattgatttcaacagaaaaaaaccgcacaatgtgcggtttttcgtcaggcgtgatgcacctcggtctcatatttttcccaagcttcatcaaatgtcgccatcgtttctaaatagtcggcgctcagttctaaataagaactgagctcgtgataatcgcttgacgttttcggaaagccgtgatcttcgtatgcctgattcgcaaaccggctgattgcgtcctgcggtttgggatgcctgtatttcatcaaatagtgataaaaggatttcatgggtttcccctcctgatgactgtcttttgttgtactattatacaattcaagtgtgaaattacaacaaaagaagactaggagaagtcaaaataattccgtttcaagatccgttctgtccccatcagctcttgatatgtgagtgtttccggtaatttttttgcatcgactaaaaaaagctgattttcgatttccgctatgaccgcttcctcctgatacgtcatgccgcaggaggagcaggcgaatgcgggtgtttctgtaatttctatggctctcgtaccgtcaggaagctcccagtacacagccgcctgacaagctgacgccttctgattgccgcaccactcgcatggcttcacggcgactcacctccgacttccgatcctgctttttgctctttcttttgctgtgcaataaatttcttttctttcaattcatctctcttttccctgcggtctttcagcgtttcatgatcagggtttgatgtaaacgttttcctcctgtcgatcctcgatacattttccggtgtgaacgaaacctctttgtccgcgaaaatggcgctcagtccgacaggctcgcgtttggccattgttcccggaaaaacagattcaaaatagtcgtcagcttgattcgggatatagttttccggctcgggataagatgtaatcaccccttcgaagtttctgatcacaactttctccggactttgggagagcaagtagttcggctgcagggcgattttaccgcctccgcccggggcgtcgacgacaaaggtcggcacggcaaagcctgttgtgtggcctctcagtccttcaatgatttccaatccttttgacacaggcgctctgaaatggccgattccctctgacaaatcacattgataaatatagtacggacgcacgcggattttcactaaatcatgcatgagttttttcataatcggcaccgaatcgttaatgcctgctaaaataacagcctggttaccgaccggaacacctgcgttaacgagcttttcacacgccgcaaccgattcttccgtcagttcgatgctcgtattaaaatgagtgttcagccagaccggatgatattttttcaaaatctgacaaaggttatccgttatccgctgcggaaatacgacgggcgctctcgttccgatcctgataatttcaaggtggggaatgtcacgcaggtttttcaaaatatattccagaatctgatcgttaattaaaagcccgtctccgccggaaatcaggcagtcacggatttccggcgtttcccggatgtaagcgattgccgcatcgagctgttttttcggcacccccattccgatctgtccggaaaaacgccttctggtgcagtatcggcaatacatcgagcattgatttgtcaccagaaaaagaacgcggtcaggatagcggtgcgtaagaccgggaaccggtgaatcttcatcttcaaacagcggatcttcaaggtcatatttcgttttgtgcatttcttctgacagcggcacggactgcatgcggatcggacatctcgggttatcgggatccattaaagaagcataataaggcgtaatgttcaggggaatggtttttacagacatcctgacgccttcttcttcctcttcggtcaaatgaatgacttttttcaggtcatcgacggttcttacagtatgggtgagctgccacagccaatcattccacttttcttccggcacatctttccacaattcaatctccttccagtgacgcttcggctgaaaccatttgtttgtcaaacgaattcctccttatgaatggccaaacgtaaagttttgcaccatatattcatattttcgagcccttctgaaatgcggcagttgttcacaagcctgcctctgtagccgtatcccgcatgatacaaaacggcgttcatcccgtaagacgctgcacgggccaaggaaaaaagatgaatgattccccggccagcgagttcctgctccaacgctttaaacaagtgtgccgttacggagttccccctgtaatctgacagaaccgcgcaatcggtcatttctgcgtgccccaaaaccggattgatatctgcgcttgccgccccaatgagacgatcctgatcgaatgcggcataatagatggtgttttctttcattgtttttttaatataaaggggattaaaaacaggagtcggataggtaagaaaaacatgtttatataagtgcgttaaacggtccgcatcatcttcgtccgcttttctgaacatcagcgtgctttctgtctgagtcattccccgccgcggtgtctcatataaacggtcaacagccgaatcttctgatacatatgaatctgaccgtctccgttcctctgataaatagcgcaccatcacaacagccttatgcccgttgtaatacccgtctatggcaccctcaataataaaaagatgcttgacaaattccggctcatcgccgcgcttggcaaagaaaatcaccttttgggctccctcttcctttgcttctgccaaaacggccggtataagcgcctcgggctgtccgtcataacgaatgaccctgatccgctcgttgaaacggtctgcatcaatctcggccgctccgctttcagccctcagttcctttatcagcgctgtcacccccatctgccaccccgcaccattccatgataaaaagagaaatgattttgacggcatcgattaacgcccggacttcaatgtattcattcgcctgatgcgccgccttgacttctcccggaccgaagacgatgaccggcgtctgtcccgcgtgctgcaaaagccctccgtccgttccccacggggacgcttcacgaaccggttttgcccctttcattttctcaaaagaagattccagagcggaaatcagcggatgctcatccgggagatcattcggaagccactgagccccaaaccattctatttccgcggggtggtgtttaaaccattcatcccggtactccaaatctttcagccagcttgccagctcttcttttactgcttcgggcgtttcatccggcgctattccgcacctgccttctatcaccacacggtcagctaccgatgatggccacgttcccccttggacggtgccgatattaatgggaaccggaatcggaacgtcccgataaagcgggtctttgatacgggcgttacggacgtgttcaagctctttaagggctgtgatgacatgcaggcttttttcaatggcgctcaccccttcatagcgggtgccgccgtgtgcggacaatcctcttaccgtaatgcggaaccacatggacccttgctgcttaacaaacagctttaaattagtcggttcgggaataagcgccccgtcagccttgtagcccttcataacagccgccagtgttcccgcgccgccgcactcttcatctacgacactttgaaacagaacatctccttttaacgtaatcccgcaggcttcaagcgcttctaacgcaaacaagagggctgtattgccgcctttcatatccgttgaaccgcgtccgtaaactttgccgtccttttcaacagctgtaaacggttcatacgtccatgcggcgggatttccttccgggacaacatcaatatgtccgttcagtatcagtgatcttccgcccccggcccctttctttacggctgtgatattcgggctttcatggaagtcttcgcgttccgatacaaaataaggatgctctttcaattgtttgacactcggctcccagacatcaatatccatgtcaaactgtctcagtttttctaaaacgactgcctgtgcgttaaattcatggccgaacgtgcttttttccccgatcagccgtttcagcaggcttaccgcttttgctgtgttttcttccgcccactcagtgactttcttttctaattgatccatggacagacccccttttaagaaaacattctcccaatctgatttcggcatccgttgtttgaatgacatcgtctatggtcgtgccattcagcagttcctcaagaacaaaagccccatcatctatgctgatgacggctttctctgtaatgatgagatctgcacagcctgctgctgtaagcggcaatgaacagctttcgaccagcttcggccggcctttctgatcggtgtggctcatgacgacaaccacttttttcgcgccttgggcaagctccatcgccccgcccattccgggcacctttttccccggcacgagccaattggcgagatcacctgtcctgctgacttggagcgcgcctaaaatggtaatatctatcagcccttttctgatcatggcaaaagacagagctgaatcaaaataggaagcacccttaactgtactgacaggaaatccggccgcattgcataaaagctcatcctcctctccgcgctccggactaccgccgatcccgaggacgccgttttccgcctgcagcattacctccatgccggccggcagaaagttcggcactaaagaaggaatgccgatccccaggttgacaatcatacctgaggtaatttcactggcggcccgcctcgcgatactctctctttccgctattcccaagcccatctccacttcactccttcactttgcacgataccctccacgaaaacgcccggcgttacaatatgctcgctgtcaagttcgccggcaggcacaatttctgccgcctcagcaaatgttctttcggccgcagcagccatcagagggttcatgttgcgcgccgttttgtcaaacgtcagatttccgaattcatcagcaatatgtgccgacacaaaagcgaaatcagccgtcagcgctttttcaactaaataggactttccgtcaatcgttacggtttctttgttttcacaaacggttgcgttatcaatgccgatatcagttaaaataccgcctagccccgctccgcctgcgcgaatccgttcagcaagcgtcccttgcggcgaaaattccacctcaagcgctccgtcagtcatttgtctgcccgcgacaggatttgagccgatatgggaagcgatcagcctttttacccgcttatgaacgataagcggaccgatacctatttccggaaatccggcatcattgcagatgacggtcaattctttaacgccgctttccaaaatcgcttcgattaatgacggaggtgaacccactcccccaaaaccgccgaacatgatgacagattcgtccttgacatcggcaattgcttcatgaatatcgatttttttatgaaaaatagacatatcagctcaatccttcttcatcattttttcagcttcttctgcggactgggaaaatagatctgacagctcatccagctccgcatatgaaatcgtgaacggcggggcgatgatgacggcgtctccttctccgctgtcaataccgggctttgctgggtaaataagcaggccccgattttttgccgctttaatgattttttcggtgaaggcctgttttttcgaaaaaacgtccttcgtcgttttatccttaacgaattcaaccccgatcaggaggcctttaccgcggacatccccgatcaccccgctgcggtctttgatttcttctaatttccgcttcagcattacgcctttttcctctgactgccgaagcagctcgtgtttcttgacatagcgaagcacttcaagcgccgcccttgcacagtatgggttggcactgtacgtatgtccgctcataatgaccccggagccccgcttgatcgtttcaatgatgtcatcagacgcaacagctgccgcaatcggagcgtaaccggcgcccaacccttttccgagcaccgcgatatcaggggcaatcccccaatgctcagaagcaagcatccgccctgttctcccgagccccgtcatgacttcatccgcaataaacaaaataccgtgcctgcggcagacaacctcaagcgcttcataataacctgccggcggagtgatggccgccccggctgctccgacaatcggctctgcgacaaatcccgcgataaatgaggaaccgatccgctgaacagccgtttccagttcagccgccgcagctttcacaaattcctctccctgcagctctgaacgatacatattaggcgctgaaacggccggaaaccgttcaagcagctgggtgaagcggtatctccgttcatagaaccctgataatgaaagcgctcccaaagtaatgccgtggtaacttccccatcttgatagaaagacggatttttggtattgccctttttcctgccaatattgaacggccattttcatcgctgtttcgactgcctctgagccgctgtttacaaaaaatgaccaattcagcccgcccggcagatgatcggccagaaataaagccagttcttccgccggagtactggtgaattgcgagcgatacacaaacgaaacggagtcaagctgttcttttaaagcttgtataatatcctccgtgccgtggccgatattgcaagtgaccgcccccgatgctccgtcaagatacttgttcccctcctgatcatacacatatgatcccttaccatgactgactgacggataatttgcgtcaagctccggtttgattaaatagctccccatatctttccacctcgaaaacccatttgcttcattgtatgaacagatgaataaccgcattcttatccttcagaaagttttttgcagaaaatacctttctgtaaaacaggctgccggaaatgtcccgacagcctgaagagcgttctggaaattctattcctattgttgattttattctttcttcggttctgctatttatctgctcatcccatcatttttgatctgaatcagtataagcagaaggcggaaaattcccgtcttctttactgtatgggaatcaatatttcacacaaatgatgattcaccttttgtaaagtatacctttcgataataggctgttctctgattgataaattatttttttcgatctcagaaaaaacagtgttccaaaatccgctgactgcctcttttgtatgatcaagcaagaaaacggcgtacttccctccggaaaatgtaccgatccgggctggttcaggcacatggtcttgattgataacaagacaaacatcatagcggcatttctctttaggagtacgattcggatgatcttgcggaattcctaaaatgacagaataatcaagcagaccattcaattgcgcccagtttttaaatgactccatcagttctttgttttgctttccgccatactctccgacgtttcggaaataagcaattctggattctggtaattcttcaatcgtcatgttcacattttctcccccttctccagaaaggtaatatgtattaaaatgtttttcaagctgatttttcagcatggaaataacaaaaagcctgcagaaaatgatgttctctgcaggctgattttcattataggattttttcagtctaacaaataaaagccgcaccgacgatgattaataaaataaacaataccacgatcagcacaaaagtgctggttccgcctccgcagccgccgtgcccgtaaccatagccaaaactgccgcaaccgtagccatatccgtatccgtacatacgcaaatcatcctttcttcttacgatatacggcattgtatgcgggccaactcccaattggtttatgcgaatgcccaactatgtaagaaaataatgaaaaattgtatgcacgcgccgaaatcttttgaagccgagtttttcataaaagcggtttacaccgtccatcccggacgtcacaaggtatacggtttccatgccgttcagctttgccgccgccatcagctcattcatcaatatcgatccgtagccttttcgttggaattgatccagaattgcgacttcttctatttttgcggttttatctgctttgttgatgaaaagctctccgcagccgatcggaatcgtttgcgaggcgtcgctgtagcacacgacaagcataaccgttccctccttatacaaaggatatttccgctcaagcttttgttcggccgccgcctcgccaatgtaaagggcatcatagatgttcataatagacgacccatcggcgaggctcttttccgtcccccaagcagtgagcgggtgtccggcctgcaggtccccattttccagtttccttgcaaaaaacagctcatcttccactacgcagccctgctttaccaaagtttgtttcagaagaagcggaaatgcgtgctccggagacgctttcacatgaatataattggcttgaagcatgcccggaacggacgaaagaaacggcagcagtttgtctaacggaaatgtacggtgcagctgaacaaagttatgcgaaaaaatctgcggcaaaaaagggtccgtatatacactgaaatgctcgaacctctgaatgccggaagtaagctctatatactgcttctcggttttatcaaattgatcggtcataaaagctctccttttccttgcacatccgactgcatctctcaaccttttgttatattgagatttcttataatttcatcgtacaccggatagaacggcattccaattggtaattgtttaatttgctgaaaggaaatgggtatcgccttctgattcgcaaaaaatcgtttcgctacgtcatgactgatcggatggagaacccctctcaaataaacataaaatttccgttcaatgcgaaacagcatcctcccgggcaaatgttgaacacagtccgatgtccaccggctgatcggcggaccgtccggaagcgattgtatttcggcccgttctaaagccgggatgccatgccgtttaaatcggtaaaagcgaaatgcgctatgatcaaccagccttttctccccgtcttctataaaataaacatgaaactgatccctgacgagctgaaaattcggaatactggcggagtcctcttcctcatattgaaataaaaacggatccggaatgacgacggtccggccttcgtataacgtatgccagcgctcgtttacaggcttccttttatttcggtcaagctgatatactttctgatccgtcccctttacaaaggatccgtcgatcaggacagacggaagcgattgatacgtgttctgaaatgagtggggtgttttataggtcgtatccaacacttcttttatcggcagaaatgatgtaaatgtgttgagcctgctccaaaaaacagagtctccgtgattccaatgcataacatcttcgtcccaaaagctgccgaacttctctttcacacgctcaagcaatgatctccggtgcatcactgaacagtgatcaacgagaaaagcggcctgatcaagcacctcttcagcaaaacgatagaagtggaattgttctgttccgcgcccgtttacatgtatcaccttctggctggaatagacggcatcaaactcgctgcattgattaagcgcttccgccatgcggctgagcctattcggatgaaatacggtgtcgtctgtcaaataagtgatgtattcgccttcggcccgtgaaagcgcatcattaatcaaaacggcataccgggtcgacttcagccgttcggccggattgataaaactgttgtcataatatatgcgatgatcttttatatacgtactgatggcggccgaggtttcttcatttgaatgatcatccatcacaaacagctcccaattgctgtaggtctgatgcaaaacactttcaatcgcctgttttacaagatccggtttgttgtaactcgttaagataattgagatcttcttttccatcccatcaccccttctgtaaaacgtaaaaaacggctccgaaagagacagagcctgatatcgttattaaaaagccccccagctgacgatgcttgaaatcgcgacgtttgatctcgtattattgagcggattttgaaaaacggccaaatctgacagcacttctttgacaattacgttctgcagtgtgctgccgttaatcagattgacgcgcgacacaggaaccccaagctcttttgccattacaagctgacgccgcaaatctgaatgatctccggacggctgatgagataacaaaagaagaagaagcagtacgagctgaaattcctcctcaaaacccccgtgttttacagtttctcctgaatccaaaatattcctctccttcattttttaatctatacaacgtatgtcatactcttacaatccgcataggcaaacaaagcctgattcgaaaattcagctgtttgattaattattgaaaaaaatgcaagcaaaacggcattcgacttataccaatcttttcaatcaggaatatgaataaacgtgaggttgaaattgtaaaggaggtgtatgtccgcatgagcgaggatcgtttggagcttaaaaagaagttattaaaaactcttttagcccctgtatttgacaacagcgctttatctggcggcacagatggaggagataatgtggaaaacaaagtaaaagatttattggaatcggcaattgatgcaaaagtggatgaagcagcggcgaaagacagtctcagcgcacaatctgtattgggaagcggtatttcattagcggcgagatggatttttgcaagaattcagcccggcactgtcatcagcattgtgatggattcaggagacatgatcggcccggttcaatttgttgcctttgacgaaattcacggaatcgtttttgttacgcaggaaaattccgttacaccggcaggctctgctacaacattgcttgacgtcgacaaagttgaaagtgtcacgttcacttcgtaacagcatatgaacgttttatatatccgttcaggatataaaggcatatacacgtattttgaccgctggatcgaggaaggctttttacagtcttccgtccgctttttttctgtttctgagtttgaggaagataccatccgcagtatacgggcattcaaaccagacatcagtctgatgatgacgggagaccgtattccgtctgaatggcttcaatggctgaagacagaacagattcccgtatatctatggatgacggaggatcctttttatttcgatgtgagtatgacaatcgcgccgcttgcggatgccgttttaacgatagaacaaaacgcgcttgatgcttaccggcaaatgggcttacagcacgtatattatgtcccgatccccgttaatcagcggctttttaaaaaacaacctgctgaagcctctcttcacacaaatctgcttctgatcggatacccgtatccgaaccgcgttgaactggtgaaagcagcggcgaagcttccgtatacgcttcgtattatcgggaagggatggcgcagacatctgcctaaaaaaatcgccagacagcaaaatgtgctcgtaatggatgaatggattgaacccgaacttgccgcattatattacaacagcgcagaggtggtcttaaaccctcaccgttcttatcggtttgcgctcaatcagaacggacgcggcatcgaaaataccagtttaaatacgagaagcttagacattgcggcttgtcaggcctttcagctgacagacctttctcccgcgcccccgttttcaacatttgtttcttacagcgggtttgcggattttgcggataagatccatttttatatgacaaacccgggtgaacgtaaacaaatcgcggcgcttaattatcaagagacagtaccggcgtacacgtatgaccggctgccggctgtgcttacggctatccgttccaagactttctcatgaaacgctcttcacatcaaaaagcagcttggataagctgcttttttcatgtttattttccgcttctgtcagtcagttttctcgggtcaacctgtttattgacctgcggatgaaagccgattttatcagcgattctttcccatggcaccattttaaaattttgattggccttttggccgtgatctatattctctccgtcctgtgcgacaaaaaggccgaacggatactcaggccccagcccgaaacccagaacgtcaattccgtctgtatcgcttgtgccgtctgtttcaggcccgtctgttatctgaaagtccgcaacatatttgttctgtccctgtctttcataaatcgcgtagctgctgttaccctggcttgaggcaagcagataacctttcccgtcagcagcgtagtaaatcgtcagtccttcaatatcaggggttaaatgcctgccatcggcacgatcgataaccgttccgttactgccgccgtccggctcagcgctgaacttccagatggcctcatcttcttctgcgatataaagactgccgtattcatcgtctgctgccatcccttctgtctgagaattcattttaaacgcccttacctttttgccggatatgtatccatttttatccgcatttaattcgtattgttcaaattcgccttctttccctgtcaccatcgcgtaatattttcctgttttttgactgtggtacaagctgaaaccgtatacttcatcaattgctgatgcaatcgggcggtttggatccgtaatgctttgtaatgtgccgtttttcccgtcaatggcgtaaatctcaatggtattctttccttcagaccgattggatgccgccgcaatatcgactttttttccgttcaacggaaaatcataacggatatcaacattgttcagcttcccggtatgataggaatgaagcatctttccctctaggctgtacacgactaagcctgattttttattggttgtgatcaatttgctgttctgaggattcttggggtccagccaaatcgcaggatcatcagctgcatcaccggctgtatcaaccggctccgtttccgccgccgcattcacggtaaaatgataaggatcagacagcttatgtttggcctgggaagaaaccgcaccgcatgtgagcatcaatccggctgccgcggttaacaaaagtgtttttgaatgattcattttccatcctccttttatgaacgtgcactttaattgtaaaatacatacaggaagttcagtgttaagtttttgtgaagattgtccgaatgtgaggatttatgaagagaaaaaattgacgtgagcaaatatttaaaatgaatatttagtacaatgttttatttgtaatttctattctattaatcgggtaacgcgatatgaaagcgcatcagattaatgtttttctctaatttttgatttattggtttctttcattaactcgctgaaattgttcaacatatgatgcatggtagagaaacgagagttggaggataagccatgcctaaacagcaagcagtagagctacaaccgttttttcacgataaaactgttctcgtcacaggcggaacaggatcaatcggaagccaaatagtaaaacgccttttgctcttaacccctaaagaagtcattgtgttcagcaaagatgacagtaaacaatatgtgatgaagcaaaaatacgcggatgaacaaagactgtcgtttgtgctcggcgatgttcgtgactacagaagagtcaaccaagtgatgaaaggtgttgatattgtctttcacacagctgcgctgaagcaggttccgacatgtgaggataatccctttgaagccattcaaaccaaccttatcggcggacaaaatgtcgcagaagcggctttgctgcaagaagtgacgcatgtgattaatatcagtactgataaagccgtttattaagatacttaccacaaacaaatcaaaaaaagaagcttactctgcactcctttccaaagcagcctccaataaatgctgagcaaattgtttataaaattcatctaagtcattactcgcttcatcctgatctatatagcggatactgtaattatctttatggacaacctttattgtttttttctttaattcctcataacgttggtaaggttccaaaactacacccccgctttcacaggagtattatatgtatgtaatggttcgtctcttgactgttctttctttatcaaagcctcgcaagcttgttcaaatgtatgatccagcgttcagtaccgatctcttcgcatatgaatatgggaatgctggctttattcaaggtgcccagtaattcaaaatgtgttcttgacatatgccttctctgcacctgagtcaacaattgtcaaataaatcctggggcaggaataagccaccgcgaatgaagaatgacgtgaggtttgaagacattatttcggttcaatatgccgcttcagttttgcagcggttttctgggaatcaaagaataaatactaaatactttcaaactttgagatatttgtttttggcggtgaagattcattgaatcttttataccaaatacgaattttttgtcctttgctcaagtcatctttattgttaagttgactaagtcccagtaaaactatatccgatctatactttttaataatctctttttcactaagattttcatagtctttaacattagctttttcattatgtatgaaaattgcttgattctctccttttaaaatgacatagccgaccatggtttgctcagcctccataaaatgtttgctttgggttttgacaccctaatgttatacttaacaaaattaacagcattgtacataatctatacaagttcaaaccgcccttcttgcatatttgtaacaagagtaaaacactgttttaggaaatgacagactaaaacgactcatttttaaggattttaacaacttccccgtagtcttatggaacacggcgaggtctttaccatcatagaaccgcacaattgcatcatgaaatatttaattggctgatcaaccacaacaccttctttaagcgatctaatgtggaatatgtgtaaggaggcggtttatttgaaaaacgatcagaaaataacacttgactcttcttttgcgttatccactcttattgtcttacttattgcattgtacccgtcctattcttcttggtttgtcacaatattctttttaggatttgcactaatatacacatttgaaaaaaagagcaaatcttcaaaactaattgctattatctcttatccattatttattgttgcgtttgtttacagcataataaacagcatgtaataatcccccgcctaagacagggttattttttatcacattgcagcaacttttgggccgcctttgtctgtgatgataaagctgtcactcccgattttttcttttgatccttatcttcataaatcgttacaaggtgttttgtcataagagccgtccctgccatcttacattcctgcttatcctaaaagtaaacaattttatattcacctagaatgatcattattagctaatccagctaaatcagatgaccagccccctgtaggcaaattaaaagcaaatcctaatgtttgaacgacagcagcagttgagtatttgtcaaagttgatcgtagacgttgctttcagtatcattccaagtctgagttatctcttttcgccttaactcctgccccaaaatcataaagcaaaccactccagtaaaattccaacaatttcaatcttgccaatggtgtttcttaaacctaattccccctctgagtgttttatgatattacactcctgaaaatatttgtttttgttaaacctacagttttattgaatcttctccacggcataaaatgggcatccccaatgagactttcggttcttttttaagaaaattgtgtctcgtataataacaaaagtatgtttttaaaattcttgttccttcttttataactaaaattttttaggtaatatattgatttcattacaaatatccattatatttgtaaatatattaaactaatggttatttaaggatggtgaagaaatgaagaaaaaacttatttcatttatcatggtgttcacgttggctgtgctggctatatcagttgtttctcctggctatgcaagtgcagcagaaagtaaaaaagcacctgtagttcaaaatagcgtacaggctcctttagcttcaaatcctgaagtacatacacagggcattcctttcgctaaacaaatattagtaaaagcacttagggttggtggccccgctttaggaaaccttattaaaaagatcccatataaatgggcacaaaaagctggtgatgcttgttctaagtggggacacaaagcggcggacgttatagatgaacttacaaatttcggagaaacagctgttactgtggccttagtgaaagccggaattccattagctgatgcacagttaattgcgaaggttgttgtgttctttttggtataactatacattaaaaacaagagagtgaggcttacaaccttcactcttttgttttaattaggtaaggagagattaccatgaatctgcttgttatgacgttatcaatttatcttttatctctcatcgtcttttttatttttatgtacagaggagaaaagaaagaagctgcagaaaaaaacacaaatgaaaaatttttattatctacagtaataggagctttggttttatcactcattcctactgcaatcataatggtgataatcttatttgcaacaggatcagcaaatgtgcttgtaaaattctttgaattagaaatagaatttaaacagattgttataacaagtgtgtgtatggttgtttattcttttacttttgataatatttttgtggctgttggaaggcatctcattggggataacttcttcaagtttatatttgcctcgttgtttaggtttttatttatttatatagtgggtatcttatgttccattgggaacagcgacaattttaaattatcattaggattaactttattttttcttttgttagaatgtattttccctaaaaagtctgaccgtgcccagaatttaaaatcttaaggacgggcatttggtgagaacattaattcatataaaaaaggaataatgttcaaaaagataaagcaggcttaatgtctgctttatttaattaaaatccctcttcatacagtgctttctctaagcaattcggctcctaaagctacactgaaccttccagctttatactcgtttacaacaataaagtaacaagcaagttgagaaatctcgaatcttgatatgctcaatggtactgttgtttttgcttcctgactttgagactgtaatgggacgctttatgtctaaaaaatctgcctataatatcgtttactgtgtagtcgatataatttatattaattggcattcaattgctaataacccgctcactgaacggaaaagcatgcttttagacattaaccttgaccataacaatgtatttgttattgaaggtctgcagggaaacggattagcttactttaatctgccaatgaaaagcatcttgaaggaatcgtcgtattaataaagctaactctccatatgggattaataaacattcttatagctggctgaaagtgattatagatttaagactacatggtaaactccgcataccttcctttgaatcttggagagtataatctctctattacataactccttaatgcttagcaaaacagactgaaaattcagtacataatacaataagttatccaaatcgtttagctgtaattcaccaaaatgctcttcatattttgtgacagattcattccagtttgaataaacccattgacctcctgaaattaaatgttattatttactttaacttacaaataaaggagtgtttaatttgaaaaagttgtttagttttattgtttgcaccatggtggccattctttctctgagcattgccactgccgcatctgctgagaccgacaattctaggttttcaactaagcttactaactctgtcgaaagtgaatttaaagcttttggtcttaaccctcctaattcaaatagcgttgtaaatcttacgaaaaacaaattgacattcgctggacaagcaactggcaatacgttatattcaaacagttattttcaaggcaaatcttcgataagctattcaattacaaataatattggaactaaactaactgtgaaagtttggaatgattccgactggatttttgctactgaaacactaactgtaaatgctaacggtacagctacaggaacaataaaaaatctagatgccaatgcgctttactatctatctttctctgctccgagcgacttttctggctatgttcaataatacgtaatctagcagctccattcgtggggcttttttgtattcgttaaaaactatcgtaagagagaattggattaattgtagaaattttgatatattagtaatacaatcgaatattcaaggctgctcctacacaaaaaacaagccagtgataaaatccttcttcttattattttttatcttagtgttaaattttttcacaggggctgattttatgtttctaataaacaattcttttgactttatgagcaacgtaacaacactagttgattttgttggcattgtaggtgcgataggctctgccttgagtatttgaataaaaactatcttttatctagacttgtccagctctctccaacatttcaaagagattgtgcctgcctcaattagtttggcattgtagtcttcaacctctttctttgcgctggccaatttatcaaaagctactcgccaacaccattatgaattttgataaaagatttaatcctcaagccatcaaaacaaacatctaaaattagtctattgcctgaagtgccatcaattttgctaaacgcagcttctttattgtaccagcataaagcacctcttcaatggattcattggtaaagtactcagtttccttggttgctacataggttttcatttcttcctcttactacgtttaaaatcacgatttcatcttcggtcctagtgatcttaagtcctttctctatatatacgcagagtgtatttgagttcgcacagtatttagtgaattgtatttgatatcaataacttcaatattaattgactctgttcttataaatatatttaatagcctatcaatttcaacccattcaccattgcaatattcatcttggaatagcgttattttaatcattgtctaacccttcctttaatgaactgctttcgtctaactttcggaaaacatattaatctgctaacaaatagctcatcgactttatcattgtattcaccatattcaccagagtcccattcaacacctacagaacctcgatttgtcgtccacaatataattcccatttctccattctcaaagaccttacttgctcccctttttgacaatcgagtatatttcaacctctttcttaaaataatcacattttaagttaactttaaactgcattatgttgagaatttcacctttaattggtaagctgacatctaagtcatacttatacaaagcaggtgatatattgaacaaaataatcggaatgaccggattaattatctccttacttgtgcaagggttttcagcaagtgattcattgactcataagatcgccatggcttgtctatttttgttcttattggtttataattttaaccatactaaggagttctctaaaaagtctctggcgattataggcgcttcctttattgtgctgatgcttgggatttatcaattgctctcttttactggtgattactttgaaagtctcggtttaaattttggaattatcctcttacttgagattgctttagttattggattagtgactgctgcgctgagtttaattaagcatattgcagaccgcttaaggaaaacacctgatggtaaagagcgttgactctttgcctttttttagctaaccatttctttttatgccgtctttcttgtacaaaatcaaacgcaatatcgacttttgccggctctgttctgtcaatgatgaattgatttcagaatgattcttaattcctcatcattcattggactccgccttaatggactcttcttcatttttcaccagaattttttcaaaagatccagtcgcatttctttctttgataagagctctacatttctaatagcaagattgaatattatttgttaatacactcggccccaacttttgcgtcttagaatttgaaaggcgtacttgcacttgaacatttgtcacttcagctgatatggaatcaatccttccagcccaattaggactctctccctcgggagtcggatatagtttaaatcgccaactgatctcccctgttttggaggcaaatccttcataaccgtcgtagcttccataagaagatggctgaggaaggtggacagcaagaatactcatattcgttctcgcagcacttggcgggtataactgcactttatagattagtgccgcacccttcgcatttttcaatttttgattcaccggttcgagtactgcactacaaggcattggacttgctttcatttgagttggagagacaataacagcagccaataaaggtataaccaaaataaatcgtttcatctaaattccctcacattttttgttaattttccttactcccgccttgaatattcatcacttttgaatggttagcttcattaaaaaaaaggtgaaaaaggcagtactgaagctactagcgctgccggtaaagatggaaaatcagcatatgaattagccgttcaacaaggcttctccggaacattagatgagtggcttgcctcactgaaagcaacaggaaattgatcatatccccttctcgaacgagggggcttctatcgcattccacaccaaattgagaaattaagaaaaaacactcttcctaatatattacattatgataaaatattacataatcagtcgaaatactaggagggtgatttttttggagcaattgatctcttcttcaaaggttggcttaaaaatcaataaatggtacaaatacataagattattcagtgttgcagatgcagaaattctaaagggtgaagttgaacaagaaatagagcatatggaagaagatcaagatttattgttgtactattcgctcatgtgttttcgacatcaattaatgcttgattatcttgaaccaaaaaccatgaatgaagaacgacctaaaatttcagacttatcagaagagatcgaaagtaaacaaagcgatctaaaaggaattcttgaatattattttaacttttttcatgggatgtatgaatttgaacagtacgaatatcttaaagcaataagtttttacaaccgagctgaaaagaagatatctattgtccccgatgaaatagagcgagctgaatttcactacaaagttgctgaagtgtactatcacatgaagcaaacccacatgtctatgcatcatattgttcaagcaatagaaacctacaaagcacacgagacatactcaataagagtaatccaatgttcattcgtcatcggtctgaattatttagacatggagtatccagaaaaagcaataccgcatttcatgaatgcattaaaacaagcacaagaaattgatatgccgcggttaataggttcttctttgtacaatctcggtttatgctcatttacaacaggacatatggagaaggcattggagtattttaaagaaggcgtctcaatttatcaaagtaattctcttcacaattctagccgactgcttgacatacttctaatgttggcaaaaacgcactttaaattattcaacacggtcgatggaaaacaggtttgtgaacaaggtcttatgctttcaaaggagttgaacgatgacgtattaggaaaaatgtttgattttcttatgggtttattcgttgagaatgacaaagaacgactttttaaaatcttagattacttagaatcaaaagctatgctttcggatgtggaagacctagcgactgatgcagcaatgtattataatgtaaatgaagaccataaagtagctacagccttttatgagaaagtgctttatgcccgaaaacaaattcagagaggggattgtctttatgaaatttaaatttgcatcggcttttatctttttagttatcttacttgggcttgttggacattatcttcttgacggccacaaagtttttaaagaagcccgaagaggccacacagccagtatccatatcgcgcttgatcaccataatgacttctcagtggaacgtagagggcaaaccgcataaatgttttggcactcccgcatagggggtgtttttttatgatctgtgttcacctgtaaagctctatgcaatgctgtccttcatagtaaaacaggtaagccttattcatagctgcaaccaaaaaaagcacaaataaatagtattgctcctctaaacttgtgtggcaatcatacaaaaacacaaaaggaacagacctaaacagtaatggagaagcacttgtcacatctggatattgaccgctcatcaaaaactgtctgctcctaatcatttactttgcagatttattctgcaagtgtgtttttttatataaaagatatggagcgttatatgaaaaagtcttatgttttatatgggatttcaggagttctaattggtgcaatagttatattgttgatcaatgcattctttataaataaaggtgaacactctgtaagtacttctaaaataaatccaaccgaggataaaatcttttttatctattcaaatccactcatcaagaaaagcgtactcatatccacatcacaaggagaaaaattcaataaacgatactttaaggtaccggatataccatatatccagaaaaaaaccccctcttcagacgatatcgtcttgttagctgaacatgaaccatattattacacattaaaaaacaacactattaaagaacataaattatccaatccatttgctttttggtatcaaggagaagatatttctgtaaaagcctataatgtcgacaccaatggaaatgaactgaaagtaaatgataaaaagttcaataaaaaatatagcctgactttgcctaccctcgtaaccatgggaggaagcgataataggtatatttacgtcattcaaggaatgtctatgtacgtcattgatagaaacacagaagggattattaaaacgattggattagcttcctatggagatgtatttgatcactctgaaaaatatgttgtagctagctcagaacatgaactaactgtaatcgaaaaaggatcatggaaatcaaaattcataaaatatcctgatgatctcgaacaagcggacgctgtgtattacgacaaaaaaagcggtaaattttacgttacatatattaataaatccgtatacgcctgcttacttgagtacgataaagatttttcttttgaaaaattcgatttaaaatttccgtatatgaatgcaaagtttaaagatcaaaaactttatgtaatttcacaagaggaaaacaaaaaagggattggtggctatatggggatttttgatatccgtactaaaaagaaacttaatgaatttgatttgcctgaagaagaaacaaaagtgcaggactttatggttttagattaaacataaagaataagttgcaaagcaaaagccccttcctgaataaggggctttaattttaaattaaatagatgttttatacgcgttaatggcttgatttctcaaaagcatattatctttcgtaaccattccaagattgtatgcttgtttgatgatatctaacacttgattatcagtttcagttacagctcgtcccccagttattctggacttccagtaatcaaactggtgatttaactctgaactgcttttaaggtttttattatcaactactttgccattctccagcgcttctttgaattcattaaaaccaattgaacattgcgtattcgaactaattcctgcaccttctgtcgctaaactgcaaaacgctaaaaatttcggatctttcgtgatattgtaagagttatttagaccttccataacattcatcctctctcgaattttacaacgttgctataaatgattttcatgtttttcccaagaccttcaacttgaatctcatttgaaggaagttcgttcattggaatttcaatgtatttgtcccatcctatcacaactttgttttgtccaagtatagggtcatatttgtatatgttcgcttcacctttgtataacaaatttctcccatcctttgctttaatgacggtcgaatttgtatagcccataaagcgaactttaatatgcagcttgtcacctttcaaaacatttgttgcatttggcttgctgcttgtaacaggctcccatacaaagtcgtttccatccgatgtgacggaaagaatctgaagactgtaaagcggtgttgcttcaattgcttttgctttcgatgtgctaatggaaaacatcgttgtaacagcaagaagtgtaattgttactaaactaagtacttttttcaatcccttaacctccttggtattatttcacatgttatttatcggtaattccagccgattatttaactcaaattcaaaaaagaacctgattctaacatggttcttttcgcataggtaactgaatgggtttttaacgacatataaatgattcctgtacattaagtatgctcacttaagggaatcttggagtcttggagtcttgctcaccccctatagaaagggggtgatgcttatgtcaacatttcaggcattaatgtgaatgcttgcatttgggtcgtttataatcgccctgttgacgtatataaataaaaaatagacctcccttgagcctgataacctgaagggttaggtctatcatgaataacataacatctgagcaagccctttgatgggttgcgaccaacaccatgctctttttattttatgcatttcttgttaaagaaatacactataaccagtctgtattttacagattgattataacagattaaatgaaaccattggaatggtttgcaaaacttttgtttattggataaaatcattattgtatttggagccgataagcatctttaatgtatcaatgcgctttattactttccaaatacttctcatgttgtctttctaaaaccttaatatcctttttaatgatctcaactttatattcttctttaacttccttagataagttatcgtttagatagcgtcgtaattcttcttcattttttgttttatccataccaattgatatgactgggtctgtttctccaattccaaggctaaataagccaaattcatcccatgcactttctaatacttcctcagtggatttttgatttttaaaagaatgtgtaactgcgccatacatgaacacagaaaaacaaacaatgatcaagaccccaattaatttctttttcattgtctcctcctttcatttcaagaataccataaaatacaatacatggaaaaataattcctcagccaacagtatcctagttcattacgggttggttttgagaggataaatgctaatccgtatcttaataacgaattagattagcttaagttaccgtctatcatcgtttgtgaaagtaacctcccacacattcaccataattctcgggaattttattttaatactttaaggagttttacatattcatcttcaccaagaaataatacggttgtaaagcccttcttttcatatagatgtcttgcgtttaagttatctgtatctacaccgaatgttatttcctcaaatccaagttgtttagcataatcaatcaaataatcaacaataataccgcctatcccgcaatttcaatatccttctttaacaatcatacgagacagataaatgcgtttatccggaatggtataatctgggtcattgttttgaaaaactaacgatccttctcctataaactcgtcattcactgagtaaataaaagtaattctgtttccgcttactaattcgtcataaaacaccttagccattttctttttcttttccatgtcccaaatattattacacttatggtattcttcgggttttaatttctttacttggtacgaatccataacctctctccctttttataattagtttctatcgaaaataaaaaagctctctttctgagagcttaactttgcaatacttttcctaacaataaaagctaattgtccttaccaaagagcaattttgcaaagtcattgtctaaaacctcaatttccacatcactgtcattattatcagtttcaattggttcatctactaaacttagaataaactcttcaaaagagttggcaataaggaaaaagtctttatcggggtgacttaattcatgatcccaaaacaatatcttttcattatcgatatccatgcatatttcattcccacctgccgagcttgctataggaataatgttcctgggaaagcgatcagaataagtattgattgcttcttggagactgttatgatcgttagctaaaccatagaagctctctattaattgtgtatcatcttcctgacccatccaaggatctttctctataggtttgtagcaaacgtcatactcaacctcatctgttgtttttttactttctaaataacagcctccatatcccttcaaaaaatccttatagtcggaaggcaattgattacctatatttctttcaatttctttgagctgctcgtttgtattaatgctaggatctgtgccagcattaatcgtaaactctttcaacttttgtttgatcttagtgaagctcattttaatactccttcatatgctatggaaaaacagatatagaccttctttttagttttaatcgtcccagtcctcatcatcgatccagtcgtctttcgattcttcaagctcttctattaaaaactcttggaatgtcctagcaacttgtttaccatatccctcttggttatcccaaagaatgactgggcattctccatctatcatcttgttagtgtcaagacaataagaaaattcatctacatattcgatcactacaagaccatcggaaaggttataatattttttatattcattggtctgctcgacaacttcagcgccgtgagagtcatatccgagaatcattgttccgtatgctcccctgaaccatactcagttaaaaaccatttatagctgtctggaagagttacattgagctcctcttctatttctctaatctgatcttcagtgactcccccgtgagaattgaattttctttattttcatcaaagaaagtttttattttcgaataatccattaaactttcacctcttattcttgattctcaaattgctgagctctccatctccaataccttcttctgaaacttttatattgtttatcaagcacaggatcatttctaaaactctgtccattcccttttaatccatgcaaaacatcactgtacttattatgccagctttcaggtatctccagcatagtaccaggctcttcttgaattaagtgatgtaaatttatttgcgtgccatctttagcaaacggagcattaccatttttcatcagttgaagattcgtaaagcctttacgatttttttgattaaggtcaatatctttcattgtgtatactctacggcttacatctctaggctctcctttaacttttaccttgccgtctatttcataggcctcatacttctctttatttaaccaagggacatttactttctgaccagtaaatggctttctgctttcatccaatttctttgcactggacaaaagtccatttttaaggttttggctgttaaccacattgtatggtacgttatcagccagagcaagatcatacttagtgttataaggaagcaaatctgaaatcttaatgtccttaattttctgacctgcctgtcctgccttgtttatgaccttccccgccgcatcagctttgttaacggctcctgcgccttttgttccgacgacagccacagccactgaaccgaccgcatatgtcacccatcttgatctggagtaagcatccccgttcaccatatctttttgatacgattcctcaatagctgttgaaatggcattatacgtgttaattggatgggcaactgcccctatgataccttcaacaacttcatcaggcttgctgatcagctgccacaaaccggttaccgtgtctttcccgacatcataaaggccgacgccggctccttttaaaatatcccaggtcacttctccggcttcttccatctgttttgcttgttcaagctgcatcacatattgttgttgggaaggttcaaggttctcgtaaccgatcttcttggcaatctccaagtattcatcaggatcagttactccatcagagagctttttcttcagatccttgatttctcgctctttcgcttcttcttttttaatcgtcaaataagcatctgaatgtcttgcaatctcgccttttttcttatgtatgacactttctctgtacgccttgacgttatagtgaagtggtgttgcgtttttccctttacccgtggcattttggagctgttgaaagtctgcttggatgaaattctcgttcgcttcggtttctgcgtattccttcgttagatcatgatcgagctttccgagcttgtgtacggtattgtcccgtttcttatctgctgaatccagcttttgatcgacatcctctgtcgagaaaacatcaagatgaacaatatcgcttatctcattaagaatatccctcatttcattccgctgctcctgcatgatagcttttgatttattcttcgcattaatcagttcatgttctaaaaatgactcttccacaaacgaatcggtcaatccggcatcagatacttttccagaaatactgttaagaaaagcaatcttcatatcgatcagatcaagccagctgtctgtaacacctgcgtgatcttgaaagaatgccttgatgttatcagcacctttgcccgaaaactcattgtcatctaaatcagccattccctgaaacgcttttctgagattgataaattgttctctaatctgatcgtattcttttgcccgtttctccgctactgaaattaacgaggatgcttcaaatactttcatttacgtctcctttctgcttctttctgtctaaattttaccatagctttattatttgattaacagaaaaagacagtccgttccgactgtcatacacagttttatctcgtcctgtaataattttcagctgtatagtatttccagtcccaaaaagcatccccgttcgacataatatatcggtctaaaaatatttcaaagtttaaatttaatggattatattctgaaccactttcaaatataaatagataattaggatcaccttgattcactctatccttgtcgatcattaaatgacattcttccaacaggtagccacaggtattccattgataccttcaaacaaaagctcgtattttagttcttcttctatttcttcaaggctaaatagatgaagacctcctccaatattctcgccctctgaaagaatttcgaaaattttcgcaccattatgctgagaaataaacttcaggtaatcatcaggaagagtgaatttatgattcgactgaaagttttggatttcactaagagacgctttgtttggagaaaaagtcacaaggctctctacaatatatccctcagaacaaaacaatttaatagcccctttttcatctaaaagacttttcaaaccattgatagtcttatggacaaagttagtcaataaaaacacccccatactcctcagaataattactgaggatacgaatttgttaatcagtaacaattttattcataattgaagcagcacttgtggtgaacaaaatgtaagtgttatttgctgttttaattactatcctatccgtagagccagtttgaagtcctctgaggcttcttttttatttggtacattcaatctaaacaaaaaaccacagagcgtgtgagggactctgtggcctatagtggctgattaaacccctatgatacatcaattaggattttatcaaaacttttcttttaaagataacatcatctctgtctcaaataatgcctgcagcagctcatctatattaatttctttctgcttgtaattattcttttcataagtacgaataatttcttcatattctgatcgattatctcctttaatggagctaattccaagctcttcaccgtatcggttaatgaatagttgtttattcatttctttcgctttatcattttcataattacaaaatgcacctgacaactggacgagaaaagtttcatcttcagaatttaggttattctcgtattcaatgtcagacagaatattgtacgaatacttctgtttttacagtaaatacaataaagaggaggtgctgtttttttggagttaaaaaacatcgttcattcttacaacattacaaatattttgggttatctcagacgctctcgtcaggatatggagcgggaaaaaagaacaggcgaagatacgctaacagaacaaaatgaactcatgaataaaatactgaagtcgattgaaatcccctatgaattaaaaatggaaatcggatctggagaaagcattgagggtcgccctgtttttaaagaatgtcttaaagacctcgaggaaggcaagtaccaggcaattgctgttaaagaaataacaagactcagccgcgggagctacagtgatgcgggacaaattgttaaccttcttcaaagtaagcgattgattatcattacaccatataaagtttatgaccctcgaaatcctgcagacatgcgtcagattcgttttgaattgtttatggccagagaagaatttgaaatgaccagagagcgtatgacaggcgctaaatacacatatgcggcacaagggaaatggatttcaggactagcgccttatggataccggttaaacaaaaaaacatccaaactagtcccagtcgaagaaaaagcaaaagtcgttcaattcatctttaacatctttttaaatgggttgaatggaaaagaagttagttatacagcgattgcttctcacttaacaaaattacaaataccgactccatcaggaaaaaagcgctggaatcaatacacaattaaagcaattctgcaaaacgaagcgtatatcggaactgttaaatataaggttagggaaaaaacaaaagacggtaaacgaacaattagacctgaaaaggaacaaattatagtatcggatgcacacgtccctataatagatcaagaacaatttcaacaatcacaagagaaaattgcaaacaaagttcccctgctgcctaataaaaacgcattggaattaagtgaattggcaggcgtatgcacttgttctaagtgcggtgaaccattatctaaatacgaaactaggcgaacgcgagaaaacaaaaacggcacggaaagtgtgtatcacgttaaatcactcacttgcaaaaagaataaatgcacttatgtgagatataacgatgttgaaaatgccattctggattacctctcttctttaagcaacttagataataagactttaacaaaacatatcatttatatgatttctaaatacgaagacgtaaatagtaatgtgaaaacaaagaagcaaatgtctgaacatctttcacaaaaagaacaagagttaaaaaacaaagagaattttatcttcgagaaatatgaaagcggcatttacactgatgaactttttttgaaaagaaaagctgttttagatgaagaatttaaagaactccagattgccaagcatgaactcaatggaactcaagaagcgcaatcagaaatagacagtaatacagtcagaaacaacataaataagataattgatcaatatcacattgaaacaagcacagaaaaaaagaactcgctattaagaatggtcttcaaagaagttatcgttacgatgacacaaaaaagaaaagggccaattccggctcagtttgaaatcacccctatcctgaagtttaattttacgctttcgatctcaccgccactgatagttcctcaaaatgcagtaaatgtcttaaaaaaccgataaagccgtttccccggtaaacacaatgggagctacgaagctgttgtccgagaagctgtttcatcaggcgaatcatcatgttcaaaaccgcggtacggtgttttgttcggtccgcttcggcaatgtgctcggttcacgcggttccgttattcctattttatttgagcagttgatggcaggcggtccgctcaccattacggataaaaacatgacgaggttttttatgtcgatcgatgacgccgcaacgctcaccctgcaatctgcggcgattacaaagggcggagaaacgtttatttttaaaatggagtccctgaggcttgaagaactgcttcacgggtttgaagaatatgcgttccggcacggactgccgcagccagccgctgttgaagtgggaaaacgccccggtgagaagcttcatgaagaactgacctctcctcatgagacggaatctttatatgaatggggcaatctttacgcgatattgccggatcccgccaaacatccggaatttcggaaggtcaatctccccagatatcaatcggatcaggcgccgctcatcacaaaagaaacaatcgtaaagattattgaacgattacatgaagaaaaaaaaacatagaaaaaaggcctgtctgataggcaggcctcattgctgagctctatttttcaaataaatgcaggcaggcttcatagccctcttccttcagcttgtctttcggaataaaccggagtgccgcagagttaatgcaataacggagaccgcttggccccgggccgtcattaaatacgtggcctaagtgggagtccgctgttttgcttctcacttccgtccggatcatcccgtggcttgtgtccagtttttcgtcaacctcttcttcctcaatcggttttgtaaaactgggccagccgcaatgagaatcgaatttatccagagatgtaaacaagggctttcctgatacgatatcaacatacagcccctcttctttgtgatcccagaattcattttgaaacggcggctccgttccgttgttttgcgtgacttcatattgcatgcggtttaatgatttgattttttcttctttattaaaagccatcttatctgtccctccaatgctcatccagaaagccttgacgtccggaacctacacggtagcgcccgtagtgatcaggatttttcttataaaagtgctgatgatagccttccgcttcataaaaaggctcagcctttaaaatgtctgtgacgatcggctttttaaatatgccgctttctgcaagctgtttttttgaggcttcagcgatttgtttttgttcatcattatggtaatatatcgccgcccgatatgaacttccgcggtctgcaaactggccgcctgcatcagtcgggtcgatctgctgccaaaacagctcgacaagcttttcatacggataaatgtcaggttgaaatgtgatttgaacggcttctctgtgtccggtcgtttcactgcacacttcttcgtaagtcggattctcagtatgacctcctgtatagccggacaccaccttttcaatcccgggctgttcgtcaaacggcttcaccatgcaccaaaaacagccgcctgcaaatgtggcgatttcttttttttctgacatacgggtgccctcctttgttcatacgtggtattattatattatagcatgtataaacagaataaaaataattctgctctcaggagaagctgaacgaatgccacgctgactacatattggaggttcatgatttgaaagtaaggacacaaatgatgtatgatatggaagctttgcttcgaaaagtgtttaaacaaatcagaaatgaagttaatgaaattctagataaagagctgtccaggaacgaattcaccattttgcggattctcagtgaacaagggcctaaaaaagtaacggaatttgcccccattcttgaggtctccgcaagccacattaccgcagtgaccgatgctttagtagaaaaggaatggatcacccgcatccgttctaaagaggacaggcgaattatcagaatccatattacggaagccggggagaaaattgtcgatcatttcaaccagaaaaaaacagaatacttttttaaacggtttgactgctactctgatgaagagcttgcaacgttaatcaaactgttcagcaagctagacaaaaaacgctgacacaaaaaaacacaaatccctgaaaggatctgtgttttttttatgaaaacttattgtttcggatgataataggaaaattcaatttcatccgtgtcgagattgattttatccgcttttacatacatgccgttgtctaaaggcatttctgacagacggatctcgatgcttttatccccggaatgaacgtgcacaaatgacgggagttcataaaagctgtccatataattcagcacaaagctgattggcaggcttaattcacctaatgaaaacttcgtcactttcaaaaccacatctccgttctcctgtacggacggttcaaatgtgacgaccgcgttaatggaggttgagaatgctttgattttacctgccacgtgcacatcgttattgatgtccactttgtagtcaagctgattcgatgccttctcttttaagtacgaattcacaaacctggcaagtgattctttggagcttgtgatatgaaagccgtactcactttttgtctgatcttgtattttcgcctgttctcccggcataaccaataatgtcacaattaccgcggcggcaatcacattgagtgcgagaagaacaaaaaacagcgatttccattttttcatcatttcaccctattctgctggtaacccttgtttttctatgatgccgtataatcggtcggcgatgagtgcatacccttttgcgttcggatgaaaatcatcatcctttgaaatccgtctgctgccgcttttttgactgaacaagtcttcaacattcaccgcagcggcgtgaggatctttttccagctcttttgcggcgatcttgttccaatccgtcacaaccccattaatttcttttaattcaggcagcgtaaacgtgaatggattatacatgctgacatacaccagctctgcgttttcattatatttgcggatttttgaaatgatcgtcttgaaccgtttttcaaaaggtttctcttccttttggaacggctgaaccgtcagctgcatcatattctggcggagcaccttcattaagtcattgccgccgatggtaaaaaagatatagtcggcgctccttaatgatttctgcacttttttattatcaagctttttcagcaggtctgacgttttgtcgccctgcaccgcataatttttaatatctaccgttttcacatgtccctttttcttaagagactccgctgtcttgccgacgtatcctgaaccgtcaggatctcctactccttcagtcaatgaatcaccgaccgcagctatgacaatatgatctttcgttttcggttcttcagcgtcagaaccggtgcgctggacagaacaagctgataaaagcaaagccagtccggcgatcaatgagaacattcgcagcttcaatctggttgctccttccccgtctactagtggaaagtgtaacatgttttttcagttttgaaaatgtctaatctgccagtttacttgagctcctcagccgctttgacatctgagaggatatcatcatacggaaccttctgcacgccgtcataatctttaagcaccttgccgtcaggtccgactaaataaaaagaagtttgatgtatgacctgatcctctccctccggctttttgacgattgctttaaagctgttcagcgcaaaatcttcaatgtccttttggctgtaaccggtcagaaaatcccagttgcgaagcgaaagcggatatttggaagcaaaggctttcagctgtttcggcgtatcattttcaggatctacactgaatgacacaatccgcacgtccaggttctcagccttcagttttttttgcagttcggtcatgtgggccgtcatcggcggacagactgtattacagtttgtaaacataaaatcggcaatccagacatgccccttcaggcttttcagtgacactgttttcccgtcttggttctgatatgaaaacggctcaatctgatagttcagcgggtcttttatcgttttccccccgcaggcgcacaagagcagcaaacaaaagacggcagcgaagcttttcatttttttcatttccattccccccatagataaaacgcttacagcgttcatcataaaaaaattcccgcaccctcccttatcaaaaggaaggcgctaaggaatgtgcaccgttatgcgttatgttttaaaatctcttggctgaaaacggcctcataatctttccacttcatacggcgcttgacatattgtcggaatgaatacactgttctcacactttgtgaagcaaaaacttctctcaaataaagctcaaggtgctgatgaatttgaaaaaaatattgttcaccttccgtgataaccggtatttctgtcacttttacctgaatcccgtcctgtcgtttgaactctaggcttttgagtaacaagatatcaatccttctttttcgattgttttctttttattatatacaatctgagaaagcgtgtctgtcattttgcgcggccgttctaaaaaaagtcagattaacaggtggaacagatcctgatctttattcacctctacgtaatgaaatcctttttgattcatccgggcaatgagcgcgccgtaatcttcccgatgcttaagctcaatgccgaccaatgcggggccgctgcttttgttattttttttcgtgtattcaaaccgggtgatgtcatcatcaggaccgagcacctcatcaaggtattcgcgaagcgctcccgccctttgcgggaaattaacgataaaataatgctgcagcccctcgtaaatcatggagcgctccttcatctcctgcattctgccgatgtcattattccctccgctgaccatgcagatgacgtttttccctttaatctcttctttgtacagatcaagtgctgacacggacaatgcacccgccggttcagccacgatggcgcattgattatataattcaagaatcgtgctgcacacttttccttccgggacaagcaaaacgtcatcgacgacggtttcgagcgtttgaaaggtttcagcgccgattttttttacggccgccccatcgacaaatttatcaattttctcaagttcaaccacttgtccggcttttttcgattcaaaataggaggctgcgcccttcggctctaccgctatgatttttgtatccggcgagatgtttttcatgtacgtgccgatcccggacaggagtcctcctccccctacgcttgcaaaaagaaaatgcggttcgacgtcaatgtcatttaaaatttcgatggcagccgttccctgtccggccatgacatcgggatcgtcaaacggatgaataaacgtgcggttttctttttcacagcattccgcagaactcttatacgcatcatcgaaagtgtcacccgtcaatatgatttcaacaaattcttttccgaacagttccacttgggatactttttgtctcggtgtggttgacggcataaaaatcttgccgtgaatgccgaggtgtttgcatgaaaacgcaaccccctgcgcatggtttcccgcacttgcgcatacaattccgttttcagtctgctcttttgagagctgcctcattttattataagcccctctgagcttaaatgatctgactacctgcaggtcttctcttttcaaatagatattgcagccatacctctcagaaagtctgtcattcctctgcaaaggcgtatgtatcacaacgtcctttacgttttggtgcgcttttaaaatgtcttttacctggatgagagagtcttctttaagcaacggtttcatttacagagtcctttcttatttaaatccctatttaatatgccattataacatgaatattcaaacaataagataattattttaattttgtaaataaaaataaatgaaccgatacaagagaaaaagatattttcgatcgcataaacgtgttatacttaaaccaattagaaccaaaaggagccaatttatgagtgtaattgaacaaactgatcctttttatcagctagccggcgaacatcacaccttttcagaagcgaaacgattggcctcgcaatttgccttatctgatttgccggtcttcataacgggtgaagtcggaaccggaaaaaaacaaatggccagagcgatccatcataaatcccgcagaaacagcgaactatttattaccgttcactgcagtcaaagcgaagagcggctcgaatatgaactgttcggggctgaaggcgcattaaacagggcccgccgcggaacattattcttatatgaaatcggagacatgccgctctcggtacaggcccgccttctttccgagctggacgccgggctttccgcccgcatcattgcaagcagcacggcgaatcttggcgataccggcgcggaaaacacgttcagcatagatttattttacaggcttcacgtgttaggccttccgctccctgctttatctgaacgaaaaagcgatataccgcttcttctgcagcatatgctgacagcctcggggcagcatgttcatatcgatccgtccgtttatccgctgtttgagcggcacacctttaacggcaacatcagagaacttgaaaatgcggcgcactatatggccgcggcagcatccggcagcacgatttatcccgagcatgtcccgccgtatatcaaaaacagccagaaagcgaaaaccgctaagaaaaaagaaaaacggctgacattgatggagaaagaagagtttttgtttattttggaagcaattaaagacttaaatacaaaaggcgaacccgccagcagacggagcatatccgaattaagcgaaaacagcacaatgacattaacgccccagcaagtcagaaacaggcttgattacttagaaaagatgaactatgtgacaaaaggccgaggacgcgcaggaacaaaaatcacattagaagggttgacctttttgcagtcactgcaaaaacaaatcctttaaaaaggaggacatttgattgttcacaataaaagaagaaatcgcaaatgccgtcacacacggaatcggtgtattgctgtcgattccggcgcttatttttctcattatctttgcggtgaaatacggctcgccgacagacatcgtcagcttttccatattcggcgcttcaatgctcctgctgtatctcagctcgactcttttgcacagcatccagcataaaaaaacgaaagacattcttgaaattgtggatcattccgcgatatacgtattaatagccggaacatatacgccatttttattaggaccccttaaagggacgctcggtctgacccttttaattattgtttggtcgcttgccatcggaggcatcgtgtttaaaatcttttttgtgaagcggtttatcattttttcaacgcttgtctatttaatgatgggctggctgatcatcatcgccattaaaccgctgtacgcttcgctgtcaggtcccggtttcggccttcttcttttcggcggcttattgtattccgccggcacaatattttatatttggagaaaagttccgtatcatcacgccatttggcacagttttgttttaggcggcagcgcctcgatgtttttctgtattttgttttattgcgtcaaagttccctttatctgaaataaaaaagcacagcctctcgtatagagactgtgctttttttatgcacggagccgtttctgaccggccggataataagcgggctttatatgtaattcaatatcagccggtttcagccgtttcaataacctgccccgcagcagccggtctgttcccgaagtgctgacgggcacaatcgggagatcgaaacgaagggccagttcctccggattgattttgccgtcttcggacagaatcagactttgccctttttgcagccggacttccgcctcctgaagcactgcatcccggctgtctccgccacaaatgacacccatcagacgcagccaatttccgagaaacggcatccggaaagctttctcgccagcgataaaaccagccggctcttcaagatgtcccgcaagcagcagaagatcagccgggcgcaatctgggatgcacatacaatacggggccgtccggtatcggctgatcatgatgaatgccgattgccgatcccgacacgtcaatgcagcctctcataaaggctttcggccgctcatacaccagcctcatctgtttttgaaaagagagccgcgggtcaagctctttttgattgatatattcctgaatatttttcatgaacataaatacaacgtacatcacaaggcagccgtaacgaatcaattcttgtccccctgcttaattctttttctcgtatacaaggtactcataatcgtaagggtttttttcatcttttactccctgtttgcgggaggtcaattcccattcagcttcattaaattccggaaaaaaacggtctccttcaaagacatggtgaatttttgtcatgtaaagtctgtccgcatagggaaagagcgcactgtacagctgggcaccgccgattacaaagcattcttcatccgccgggatcagcttgagcacttcctcagccgagtcggcggtaatacagcccgggaatgaagattcgtcccgtgaggttacaacgatgttccgccggttcggaagcgggcgtccgattgattcaaacgttttgcgccccattacaatggtgtgacccgtcgtcacttttttgaaatatgcgagatcatcgggaaggtgccaaggcagatcgttatcttttccgatcagccggttctcatccatcgcaaaaataaacgaaatcatacgctgacagctccttttatgtgcggatgcgggtcataatcctcaatgataaagtcttcaaacgtaaaatcaaaaatagaatcaacatttcgcgcaaaccgcagtttcggcagcggacggacatcccttgtcagctgcaaattcacctgctccacatggttttggtaaatgtggacgtctccgaatgtatgaacaaactcacccggttcaagtcccgtcacatgcgcgatcatcattgttaaaagcgcataagacgcaatattaaacggcacgccgagaaagacatccgctgagcgctgataaagctgacacgacagttttccgtccgcgacataaaactgaaacaggcagtggcagggcggaagcgccatatgatcaatttcgccgacattccaggcgctgacgattaaacgtctggaattcgggtttgtcttgatgtcatgaatcagccgggagatttgatcaatggtctcgccgtccgctccgcgccacgaacgccattgagagccgtaaaccggtccgagttctccgttttcatccgcccattcgttccagatgcggactccgttttcctgaaggtagcggacgttcgtatctccttttaaaaaccaaagcagctcatgcgcgatggacttaaaatggagctttttcgtcgtaagcatcgggaaaccttcctgaaggttaaaccgcatttggtagccgaacgtgctgatcgtacccgttcccgtacggtctccttttttttctccgttttctaacacatgacggcacaaatctttatattgtttcatttttttcatccttttaaagtagtcttttagtagtgtaacacaataaaaaatcatttctgcaaaatttctcagaaatgatttttttatttcttctcgctattacacgctcatccagtcaggcggcgtattgcggtcccagtaaatgctgccgagctcatgatgtgattgaaatccgtcttcagcggtatggtaatgaaaattaaaccagtagccgtcttgcggaggatgatcccggcggacgtggaaccttaaaagatcttcacctgtcagcctgttatacacatgaaaaattttttcagtttttccggccgacggtttactggaaataaccacatcctgatacgcttcatcatcttgaaacttggctaaatgtcctgtgatgacatcttcgattttcggcagaatttcacttctgtaatcatcttcaatgaccggagagattttgctgccgaattttaaaaatgattgattttcagcatcaccgagaagctgctgctgatacgattgaaacagtaattcaggctcccgccctgccttcgcttctcccgtcagggcgtgttcatcataaaaagcggtgtaatcattctgctcaagactgctcgactgtcctgaaggcttgtctgtcatcaaagcagccggaggagacacgagtccgaacgttacaatggtaaacagaaccacaagggtctttttcatccacaatttcatgatagattgttcccctctgttttattgtcctcttttcctttattttagcatagattaaagcgcggcgtcatgtccggcaccgtattatcatgcaatatgggaaattggtaactgtgaccgagtggataaaccgcttacaataagaaggagaaaaaggaggggatgagatgattaacgctttatttgcgactgtatcacttctcacgctgctttattttgtcgttatggaaatcactgattaacgaaaaagaagcccatgatatcatgagcttacatggatgacaccgaagtggaaaagcgccgtctttcttttcagcaccttgaagccgtatcgttcaaaccgcgggcttttccaatggtctttaagcactacgcattttttcgccgcccggacggcttgcgtgatgcactcttcgttaaaaccctcttctgccagcgcgcggagcggtgcaatgccgtctgacgtttcaacaggttcgtgaaacatcgggtcaaaataaatgacatctaccgatgaatcaggaagctcccgcaaataatcggcgcagtcggcatgtttaacctgaatgcgtttcatggcggtttggagctgctccattccggtttcccacgtttgaagtcctgtttctacaagcaatgagacaagcttgtttttctccaggccgatgacttgtccgctttttccgactgccaggcttgccaaaatcgcatcggatgccaggccgagcgtacaatctaaaaaggaatccccctcgcgtaatccggctgcttttaacaacggctcggcttcccctctcaaaaaccgctttgcgcggaacatcgctgtattcgggtgaaaaaagaacttctccccttgcttcgtgtaaagttcgaaccgttcctttccgatgactaaaagatcgctagcggctcgttccagcattttttcaatgggctgtttattgcggctgcagtaagtgtcacccagcctgacactgagtgactgcgctgtgtgtatcgtgtattcgcttggtctgtaactcgttgtgatcatctttttctccaaaaagaaaatgcccggaattcgggcatttcagcagtgcgcatcgaaggcatccgtcagatttttcataatttcctccatgtcatgcccttcgatttcgtggcggggaataaaatgaacgacctctttcccttttaacagcgccattgatggcgaggaaggttcctgccccgtaaaatattcacgcatttttgcagttgcgtctttatcttgaccggcaaatacggtaaccgtatgatcaggcgctttttcatgctgtaaaacagcctgagtcgcagccggacgggcgagaccggctgcacagccgcacacggagttgacaacgaccaatgtcgtgccctctgcctgttccataaagctttctacttcttcagcagtcgttaattcctgaaaacccgcacccgtcagctcacggcgcatcggcacgaccagctggcgcatatattcttcataagccattgacataaaaaagccccctctaaaaatccttatatgaagtcaaggatactatagagggggccggaattcaattgttcaggcctctgttttatattttcatgattccgcctgtattggcgcttgttacgagtttggaataccgggccagatatcctgtttttactttcggctcgaagcctttccattcggccttgcgtttttcccattcttcttcaggcacttgtacgtccaaaatccgtttttctatgtcaacgatgacatggtcgccgttttctacgaatgcgagcgggccgccttcagccgcttcaggtgatacgtgcccgattgaaagaccccgggacgctcctgaaaaacggccgtctgtaataagcgccactttcgggccaagccccattccgacaatctgagacgtcggagcaagcatctccggcatgcccggtccgccctttggcccttcataacggataatgacaacatctccttcttttactttgcggtttataatgccttcaagcgcggcatcctgggaatcaaagacgacagcgggccttcatgtcttgtaatcccgtcctgtacgccgcctgttttgataatggcgccgtccggagccagattcccaaacaggacggccaaaccgcctttttcggtaaacggattgtcaagcggatgaatcacgtcataatcctttacttcatgacccgcaattgtttctccgagtgtgcggcctgttacagtcagcgcgtcaagatgaagcgccccttcttttttcgccaattcattaagggccgccgagactcctcccgcttcgtgcagatcttcaatgaagacgtccgaggccggcgccaatttcgataagtgaggcacccgttcagccacttcgttaatgcgttctaaagagtactcaaccccagcttcattggcaagcgcaagcgtatgtagcactgtgttggttgagccgccgagagccatgtctaacgcaaaggcgttgtcaatcgctttttcggtgacaatatcgcgcggcttaatgtcttttttgatggtctccatcaattgggccgctgattttctcacaaactctcttctctccggtgaagttgccagaattgttccgtttcccggaagcgccagaccgagcgcttcagacagacagttcatggagtttgccgtaaacatgcctgaacaagatccgcacgtcgggcagccgaactgttccagctcctgcaggtcgctttcaccgattttcccggcttgatatgcgccgacgccttcaaatactgaagaaagcgaaattttgcggccgtcgcttgtgcggccggctgccatcggccccccgctgacaaaaatggtcggaatattaatccgcatagccgccatcagcattcccggcgtaattttgtcgcagttcggaatgcagaccattccgtcaaaccagtgcgccgagacgaccgtttcaactgaatcggcaatgatttcacggctcggcagtgaatatctcatgccgatatgccccatcgcgattccgtcatctactccgatcgtgttaaattcaaaaggcacaccgcccgcttccctgattgcttcttttacgatttttccaaattcctgcaggtgaacatgcccgggaacgatatcgatgtatgaattacagaccgcgataaacggcttgccgaagtcttcttcttttacgccggcagcgcgaagaaggctgcggtgcggcgctctgtcaattccctgtgtgatcatgttgctgcgtaattctgccatggtgatcccctactgtttttagactgtgcactatttttaaaattttcagtttattctagggcgcgttctgcaaattacctgtttacagcgtctttgccctgtctcgcttttctattctttctgtatttcgataaaaaccctccaacaattaatattgtacttactatatagagttttgaatcatttttcaacaatattctaaataatttttataaaaagtgaattcaaataaaaaaggtgcatggcgcacctttttgttataactgttctttttttctgctttcagtcatctgtttccagactgaacctttcgcctcttctccgtgctcaatccgttcaatcgccattttgacttgcaggctgacttcgaattccggatcgtcttccgccgcttttaatgcttccagtgcgctttcatcgccgacttcatataaaaacatggccgcgcgccagcgcacgagcttgcttgagtcactgagcgatttcgtcatagccgggatggcgctcgcatcgccgagatccgacagacagtcacccgccgtccttctgaccgtcaccgttttgtcttcaagcgctttgtataacagcggaagcacagacggcttttcgatcattcccaaataaacgacggcttgtcttctgatcgaagtcttcggatcatgcagcgccttttctaatactggtaaatcgtcttcatccggatccatttgctcaagatgggcatagcgctgtttccagtcttcatcatcgagcatttccaaagtcactttataagctttccgctgcactgccggtttggcctcacccttttgctgtacggctgcttctgtcaggcgtttgagccgctcatcactgtaggcggcctgaagctcttctgtgacatcgtgtccgatttcggtaaaatccccgaagcgcacgccttgttctttccaagcccgctcaaatacaacatttgaagcttcggaacgcagctttaagatggcttcttggaaacgttccggaaggccgaagcgctcttcacgttcgccgtccgtcaatttgacctgcatcgggattccgctgaacatttgtacgaaaaccttcacttcaccgaacgattcctgttcagaacggctctcagactgctccgtatgttccattccgaaagcggaacggacctgaggcagaatgtccttccagtcaaaacgggcgtttctctccacagccaggaaatcggcaacgtgataaacaccctttactccttcaatgtttaaaatatcacgtacgacggccggagcatcatctgcctgatcaggcttgtaattgttgcttttccccgccggaagctcttcagtcaaaatcactttcatcgtgttcggactcggcgtcggttctattgatttaatcttcatattggtcctcctatgcgcaatctgacacttattctaacatagtcggcacaagcgttctattgcgccgcttagcttttgccgatgccggcctctttttggatacgggcggcgaactgcaaaagaaattgatgccgctcctctgctaaacccgcccccgcttttgtattcattaagcctttaagcttgattaatttatcctctatatgggccagcacacttgtttgagttccgtacatcgggtgacccttcgcgccggcaaacataaaagccctgccgatgcccgctgcgccgatcgcatcaagcatgtctgcatcctgaacaactttcccctccaaggaaagcggccgctttatcagcagttccctgtgtctgaatgacattctcgtgatgatatccgcgatctcctcaatggagccagccgcaatgttgaaagcagccagccgttctgtcacttcgcctgccgtcagcctttcgcttttttcgagcttggcgtcaatcagatcatgaaccagcgcggccgtctcagtgataaataagtcggcgccttcttcttttgccatataaacagaaagtgttgcgacccgggaaatatgaagccagtcatggcccgtacgttcattgataagcttttctctgacccaattcctgacgctttccagctgctctttttcgttcaccgtatcacctcttatcgggccaaaagcctctgcaccgtatcttcaagctcttttgggttgacgttcggtgaaaaacgcccgttgacttcaccgtttcggtccacgataaacttagtgaaattccatttgaccgcttttgtgccgagcatccccttcgcctgttccgtcagatatttgaagagaggatgagcgtctgccccattgacatcaactttcgcaaacatcgggaatgtgactccgtagtttttcacacagaactcttgaatttccgcttcatttccaggttcttggttcatgaattggttgcagggaaatcccaatatttcaagaccttcctcccgatatgtatcatagagctcctgaagctgcttgagctgggatgtgaacccgcatttgcttgctgtattcacaatgatgatcaccttgcctctgtaagccgatagcgtcatgtcttcgcctgttatggtccgtacgtttatatcgtaaattgtcatctgcggccctcctttttacattcttcatttattttacctgttttacactgcaaaacaaacggtaaccgctttttccttccacttaacggaaaacgtttttttcgaggaaccaaacggctctttacccgtcataataaaagagccgctccgaatttatacccatttgccgcttttatccctgtcattatgcgttaaatacggtttattacgccgggatggattgaaaaatggcttaaaaatttctataatgaagaaaattaacggggaataacggaggtggcatgttgcctattaatataccaaatcacctgcccgctaagcaggtgcttgaaagtgaacacatctttgtaatggatgaaagccgggcttttcatcaggatatccggccgcagaagatcgtgattttaaatctgatgccgaaaaaaatccaaacggaaacccagctcctcaggatgcttgggaattcacctttacaagttcactttacgtttttaattccgagcacacatactccaaaaaatacggcaaggcagcatctggatgaattttatacggatttttccagcatccgccacaaacggtttgacggaatgattattaccggggctccgattgagcacctgccgtttgaggatgtttcttactgggaagaattgaaggaaatcatggaatggagcaaaacgaacgtcacttcaacactccatatctgctggggcgctcaagccggtttatactatcattacggcattgagaaagtggagctgccgaaaaaaatcttcggtgtgtttgagcataccgttcttaaaaaacatgagagattggtaagaggatttgacgagctatactatgtgccacactcacggcatacagatattaatacggagcagctgcaatcggcttcggatctgaatgtgctcagcgtttcagaggaagcgggggtctgtttaatcgtttcaaaagacgaaaaacagattttcttaacgggtcatccggaatatgataccgatacgctgcttcaggagtatgagagagacatagagagaaatctttcaaacgtagaagctcctaagcactattttgcgcccggcgggaaagaacctgttaaccgctggaaagctcatgcaacgttattgtttatgaattggctgaattattacgtatatcaggaaactccgtatgaatgggattaatttttgttttaagtgatacggtgacaaaaatatgataaaatactcttgattcagtatgcgtataacaaaactttaaaataatggaacatatcaattaaatttagtttaaatatgttggcgcgcttattataaaatgatgcacttgtgttatgtttatctatagacaataactccttacgatgcatgaagcttgcttgttgttgattacattgaggtgaatttacttgaataccaataaaaaagtattaattttgactgcaaattacggaaacgggcatgttcaagtggccaaaacgctctacgaacaatgtctgcgtctcggcttagatgtgacggtttccaatttgtatcaagagtcaaatccgattgtttcagaggttactcaatacctttatttaaaaagcttctcaatcgggaaacagttttatcgtttgttttattacggagttgacaaaatctataataaacgcaaattcaatatttattttaaaatgggaaataaacgtttaggccagctcgtcgaagagcataagccggacattattatcaatacatttccgatgattgtcgtaccggaatacagacggagaaccggaaaagtgatccccacgttcaacgtaatgactgatttctgccttcacaaaatctgggttcatgaaaatgttgataaatattatgtcgccacagattacgtaaaggaaaaactgattgaaatcggcactcacccgaacaacgtaaagatcacaggcattcccatcaggcctcaattcgaggaatcgatgccgaaagagccgatttataaaaaatacaatctctctcccgacaaaaaagttcttcttattatggcgggagcgcatggtgtgctgaaaaacgtaaaagaactgtgcgaaaatctcgttcatgacgatcaggtgcaggttgtggtggtatgcggcaaaaacagctcgctgaaagaatccctcagcagcttggaaggtgacaatgccgaccggctgaaagtgctgggttatgtagaaagaattgacgagctgttccgtattacggactgcatgatcacaaaaccaggcggcatcacactgacggaagcgacggcgatcggcgtacccgttattttgtacaaaccggttcccggacaggaaaaggaaaacgccattttctttgaagatcgcggtgcggctgtcgtggtcaaccgccacgaagaaattttagagtctgtcacctcccttcttgcggatgaggagaagctgaaccggatgaagagcaatattaaaagccttcacctccccaactcttctgaagtcattttgcaggacattataaaagaatctgaaatgatggccgggaaggcggatatggcattatcgtaaaagaaaagcacacgaacgattcgtgtgctttttgtttttttccggttaagctttgttactggaaaaataaagataaaaaatagggagcggccgcttgacgcccgctcccatatggtgtatagttgaaccatcatttaacaacgtttacatacgtacggttggatgatgacaaaattttttttagcacgaaggtgctacagtactaggaggaattaagcaatatgcaaaacggtaaagtaaaatggttcaataacgaaaaaggattcggcttcatcgaagttgaaggcggagacgacgtatttgttcacttcactgctatcgaaggagaaggatacaaatcattagaagaaggacaagaagtttcttttgaaattgtcgaaggtaatcgtggacctcaagcttctaatgttgtaaaactctaaactcaatacatgttgatcagatgacaaatagaggagaggcgtatgcctctcctatttgattgccgtctgaatctcaattgcgacaagattctgcttacagcgctgctcgatttcttcaatttgtttctccattgacggcattccttttttcgccatttccgctaaacttcccagatcaccgtatatttctttaaatgtctgctgaaggattgtttttaaatcattatcattcacggctggtttttcccttctctcccaagataccctgaataatagtaaataagccctaattaatcaggttcaatagttatatcggcttattttctatatttttttctattttccgtacatatttctaaaaaaaatctccaaactatttgcggaggtgttttttaatggactctgaattttttccaaacggactgacggataaacgccagcttgaattagcggtggaaacggcccagaaaacaacgggagcggctacccggggccaaagttcaactttggtggagtctgcttaccaggcgattcaggatgccagaacgatgtcacaatccagtgaactgcaagctctcgaccaggattttctgcaaaagcagcgaatgcttctcgacgattgccagcatcagcttgatgaattcgaaaaataaaaccgcagaagctgcggttttattttttattgatttgtcagcaccttgccgtaggctttcagcttctcccccaccgtgcattggttgatgcagaaagaatgagcgtgcgtttttccaaactctttgcggaaatgcttttttacgaaacagtctttgcaatattcatcctgaagctctgtcaattctttataaatgctttttttatccaatatcagtcatctccgttaccttctaatgttatgcggctttcaatctgccggtccgagagaatttttctggcaaggtcatccgcttcttgattttcctttcggtttacggcttcatatgtcggtgtcagctttaaggattcgagcagcgcttcaattttatccagccattcgttttgcgtttcatcataacacggccagctgccgtcaagctgatgcaaaacgacgagggaatcccctcttatcgtgattgaatttctgcttgcgccaagttcctgcacttccttaagcgcttcgtacaaagcggcatattccgcctcattgttcgtctgaagcgttaagcttttgtttttccgtatgcgatgccgcttgccgccgagagaataatacacgacaattccgagtccggcgcgtccgcttgttttgtcaaagccgccgtcgaaatacactgtaatgtcgtcaggttcgtacgcaagttcttcagtaagcttttctaattctttaagcgtccagctcgcgcctttttcatcctcaaaataaatgtcttttatataaggaaagcggctgacttctcttgcaagcatgcgcgctttcggaacggtcagccaatcttcggaaaaaaacgcgacagggcctgttccttttgcttctatttcgatatacggcttaagattcattgaaatcaccttaccattcattagttgacgggcgtgtgctataatcaaaccattctcaaattgaaaggaagtcagcaggttttgtttaacgatgtgttatggatcttatttgcggtcattcattttatcattgttcttctgttttataaaggatttggcaaaacgggcctattcgtatggatcggtttcgccacggtgtgcgccaacttgcaggttgtcaaaacagttgagctgttcgggcttacggcgacactgggaaatatcatgtacggcaccgttttcttcgcaacggatgtgctgaatgaaaaatacggtcccagagaagcgcgcaaagccgtctggctcggcttttccactttgctcgctttgacatgcgccatgcagggggctcttttatataaaccggctgcgtcagatatcgcgcagcctgcccttgagacgattttcggttttctgccgcgtgttgcactcggaagcctcttggcttttattttcagccaaacgatagatgtttatgtatattcagccattcggagaatctttccttcagacaggcttctctggctcagaaacagcggaagcacggcgctcagccagctgctggatacatttatcttcactgccgtggcctttatcggcgtttattccgcgggcgtatggttcagcatctttatttcgacttacctgattaaatttgcggtatcactcatttctgtcccttatgcgtatgcggcaaaacgaatgacaccgaagggagagtgacggatgatgcctgctgaaatttacgtggacggtgcaagcgccggaaacccgggcccctccggtatcggtatttttattaaacatgacgggaaaacagaatctttctcaattccgatcggcgaccattcaaatcaggaagctgaatttctcgctttaattgaaggaatgaagctgtgtgccgcccgcggatttgagtccgtgtcattccggacggattcagatatcgtggagcgggccgcggaacttgaagcggttaaaaacaaggctttccagccgtttgtggatgaaatcatccgcttaaaggccggatttccattgtttttcattaagtggattcccggcagacaaaaccaaacagccgatcagctcgcaaaaaaagcggtccggctgaataaataaccggaatgaaattgcgtttcactgttcatcctacaaatgaggtgaacagctatgagaaaagaaaataaaggccggcagaccgggggcgtgaatcctcagggaaatatggaaggaaatgcgcataaagacccgaaatcagcccttgaaaacaacgcaaaaaaaagcaatacaaaacgctagagggatcagctgatctctctggcgttcagcttttcgagcattctttcaattccttttatctgatggcgtctgagcattaaggatgcttcttccatcttcaatgaaaaaatcgcttcttcaagcgtacagactaacggcacctcgcaatgtatttcagcaagctgccttgacagctccaattctttcaagctttgctgaattttcgtttgctggcccttcggcaagagagcgaggctttctaataaccgttctatgttttcgtattcacggatcagcttgtacgccgttttttccccgatccctttaacgccgggatagttatcgctcgtgtctcccatcagcgccttaatgtcaatcagcgcttttggcggaacccccgtttcttctctgaatatctcatctgtatataccttataattgccgatacccttttgcagcagcgctacttgaacttgatgattcatcaattgaagcagatctttatcacccgttacaatcgtaatttccgcttctccggaaaatagggcagaaagcgtaccgatacagtcatccgcctcatagccttttatgccgatgtttaaaaaaccgagctctcgcgctgcttctttcgctaaatcaaattgcggaatcagctcaagcggcggttcgcttctgttggccttataatcttgaaacaaatcattgcggtacgttttgcttcccatatcccagcagcagacgacatgtgtgggctgaaacgtatcaaccgccgtaatgagatgctttaaaaaaccgttgacgccgtttgtcgggattccgttttcatttatcataaaattgcgatgaacggccgtcgcgaaaaacgagcggaacaaaagcgccatgccgtccacgagcagtaatttgttattcatatatcgaaactcctttttttattcaatgttcctattttaccaaagaaggcggtaaaaaaacagcatccccccatttggaagatgctgccgtcacgttactcaccgtgtcttttattgcttgccatcagcttttcagcttcacggccggcataagaatcaaatttctgtccgaaaccgtttttctttttggcattgttattctgctgaacatttctgtttcccagttttgttctgcccattgtcatatccccccttagagaagatacggatagtatgtacagcaagcgctgatgacacacgcggcaggttcatccattactgtctgctgacgaattctttcaccatctcttcacttacgaatcgtctttgcggcacgatgccctttttcgccagctggttcatttttgcggtaatgccattgatggcatctgtcgtgaacggttcattctgtctgcattttacaatggcttcttcaatggcctgttcacgctggtagtcaagctgtacaaatgttttgacgtgctgatgctgttttgcggaatgtgctgaaattgctttatggacttctgacataaaaggtttcatctcgcttttttcattttagtctaccacgactgttatctgcccgccaaccggatttttaaattttcagcatttcatctttctttttccatgctttttcggcttcgtaaaggtgttcaatttcccttgcactcgtattttccgcaagaccttgtaaataagtgtcccgctgctcgcggatctgggacaggcttttatccgccatgtcttcttgcagacggcgcacctgctcagtatatcgctctgaaaggctttctttctcctgctcaagccacttttctgtcactttttgcaggctgagcctgagcccttctacaaacgctgcttttccgttctgttcaaaaaactgcttcggcgatttaacttcttttatgtgatgtgtgaatgccgagacgtcaatgaccggagcgacttctttcagctgaacggcaaattcgttttcggcgctcacataaatggagaaatctccgtcttccataagcttcttctgacagttttccatccattcctcagtcatatggcgctcaataaaaccggtcatccggatatcgagcgttttcagctcttgaatatattcaaaacggaattccttgagcgcttcattcagcgccgctgctatattttgtttccaatcgccgttttgaaggcccggatggaaggcggttttcagcatatcattcgcataaaatgtcaggcgatgtttaatgtgatagagctgttcttccgtatctttcatcacttttcgaatgatgacctcagacgtacggcgctttgaaatgtcagcgagagctttttcataggaagactccagatgctgtttctttttctctttttcttctgccgactggtgaagagattcgtgaagctgttccaccatatcgcacaatttgtccgcctctgttttcagctgggcgcagctggccctcattacatcttcctcaataaagtgctcaagtccggttcttacatcagagaacctgttataaaaagctgcttttttacccgcaagctcttctttacttgagacatgatataattttggccggttaattccctcttttgagagttctgagcggacatagtctttgacggtttccagctcgctttcggttttggccagatcggcggcgttaatgacaaaaaacattttatccatgccgaatgattctttgacgaggccgagtttcttcagaaaagacctgtctccttttgaaaaagaatgctgatagtacgtcatataaaagaacgcgtcagcatcttttatatattgaaaggcaagttccgtatggcgcttgtttatactgcttgctcccggcgtatcaacaattgtgatgcctttttgcgtgagaggcgaatcataatacacggtgacttcttttacgcagcaggccgttttttcttcggcagcatacggttttaaatcttccaccggcaccgtcagtgtctgcctttgacggatctgttcttcatacgtatcaaacgcctgcagcatcgtctgaatcaccgggataagttcatccggaactttcccctttttaatggcataattccatctctctttcagtgaacgcccctttacatcagcgtctttcagctcagtcagctgaagcatttcagcgtccagatcctcctccgtcttaaaaacgatctccgcagatttatgcggtttgccggcttgcggtttcgttattttgttaatcgtagccgttgtgggcgtcggtgatgacggaagcacgtattcaccgacaagcgcatttgcaaatgatgatttaccggaactgaatccgccgaataacgccaaggtaaactggcggttttcaagccgctcaatcctgcttcgaaaggcttctgcctgttttcctaatatgctcgaggattcaagaatcccggcaagctcatagaaccgatcagtctgctcttttataggaagttccttcatcgcatttttttcgggtttgtttacttcatactgtacagtctcttttggtttctctttttggacgggcgcttttgcaaggcgtttttttcgcgtataccagtcgccgcttcccgtatcacaggtcaattcttcttcccacaaagcgcggacccgggctgctttttccaaggcattgcgttcttcttttgccgattgcgcgagctcatcccttatcttcttttctttttcgagccggtttttcaagttctcaatgagcggtccgttttttgcctgaacataagcggtaagcttctcaatgagttccgctgtctgtcttttggcttcccttctgatcatctcagcgaggtctttcgtataagttaatacgtattcagatgaaaaggccgctccctgcttaagggcctgagcggtgatatcatcagaaagcggtgtgcggtacgcctggattttcttgatcagttcgtccgaatccgcttcataccgcttggccgctttcgtaaatgtgtcgataatgtgccaatccgcttccccttccgttctttttttaatatcggcaaaaaattcagcatgccttctctctttctcctgagccgttttcgcttttgaaaagaataatccggttttaaatgagggctgctgtgattcaatataagcagatgcaagctccctcatctcaaagggtgtcaaattagcgttttgcaatatgttctgcacgtcttttctgatgtctttctctgctgtttcagcctgttgaacggctttattaagctcatcttcaacagaacggacaagtgcttcttgtttgtcaaactgctctccgcttccgtttttatcatcttttacgagcatctctgtatgctctttgactaagtgtgcgacttttctctccgttaaggaccataaatttgtttttgcctgctgtttcagcttctgcagatgttttttcagctgttccatgccgtttaaaggatggtcaggctcagtgacagacgtaaagaaaagcgattctttcggtattcccgcgccttcaagcatatcttccacctgcctgcggtactcttcaaacttcgtttcggtttcatcatgcctgtcaatttggttgacgatcagaaacaaattcggaatacggtctttgatggagctgagaaacagcatattttcttctgaatgaacgtgattataatgaacgacgtaaaataaagcgtcagcctggtggagaaccgaagcggcagataaaaaatgcgcttcgtccgtcgaatcaattcccggtgtgtcaatgtaggccgcataaggctctgactccttaaagccggcatagacttccaccgtttcaatttgctcaccgtctttacagaattgctgcacttgttttttatcgtaacttcctttaatttctgcataagccccgtccgtcgtatgaagcacgactttatcttcaccgtgccggatgacaacgaggttggcgcttgtgggaatcgggcttgtcggcagtatgtcttcaccgagcaatgtgtttaataaagaggactttccggccgaataatgcccggtaaacgcgatataaacctcttcatcagccgcttttttcataatggccgcgagctgatcggcccgtttttcatcctggtgatccaataattgtacgtataaggcacccgttctgctgaaaatctccctgttatggcgttcttcttctgtcatgtgtcttaacccctttgtgtctgtcgcatcaaatgacgttttcatttttagaaagctctgaaaaaaacctctcccccattttacacaagaatggcccacttttcttcaggaaacgtaaaaaagccgccgatatcggcagctgataaagaaaaaacacccgcggcattaaaaaccgcagatgtttaagaagacatcgatttattcgaaacttttttcaatacgaaaccaattaaaacactgtatgtacaaacggctgcaaataaaaataacattgtcattttcggcaccaccttgaatgagaatcattttcatatttacatcttatcatgagtgagaatgattttcaatctctattttgcggtgttttcttctagcgctttctcttcggcgcgaatccttacagtgagcatgcaggcattgagaatcgaaaagagaaacagtgtccaatacgctccgtataacagcggcagaaaaataaattctaagatgacgaccgcgtagttcgggtgcttcatccacctgtacggcccctttctgacaagctccgcatccggcacgacaagaattttcgtattccaataccgccctaatgataatagagcccaatacctgatcccctgtacaaataaaataatacatataatggcggcccaccttggagaaagcgttttttgaaacgccgccacctcagctgtaagagagacaaaaaagagcacgtgcatcaggacgagaaagagataatgtccttctccgtattcgactgcgccttgctttttcaccttctgctcattgcgccgggccacgatcatctccgcaatccgctgggccgcaagcagcatgataaacagccaaaacattaagaagcccccttttcccagctgaacagcaaaagctcagacgaaaatcccggcccgagagcgccgatcagccctttttcgttttctttctgccggccgcggagcaactgttcttttatcacatgaaaaatagttgcggaagacatgttcccgtgtttttgcagcaccttccgagatgcctcaagctgaccggtgtccattgaaagactcgttaaataggcgtcaatgacctttttcccgcctggatgggcaagaaaggttttaatgtcgtgaggaccgacaccatattctattaaaaattcatcaacattgtccttcagccactgtgaaaccagggtgggaatatctcttgaaaaaatgacttgaaaaccgctgtcggtgaattcccagcccatcacatcttccgcatccggcatcatcaccgattgagtggcgaatatccgcggaagaagcggctgtttgacgtcgtttcggttcgccttttctcctccgactagtactgcggcaattccgtccgcaaacagggaagttccgattaagttgctttttgacttgtcgttcggctgaaacgttaagctgcagagttcagccgcgatgacaagcacgtatgcttcaggatatgcgcggcagtattcgtacgccctggacaggccggccgctccgcccgcgcatcctaagccccagatcggtatccgttttgttttcgcagaaaacggcagctgattcatcactttcgcttcaatgctgggtgtcgaaagcccggtgctggaaataaaaaagatcgcatccactttttcataaggaaagggatttgttaaacaatccgggtttgttaaacaatcaagtgccgcatccgcactgtgcttaacggtttcttccgtatacagccggttcttttctgaaaaaccccgcgccgttttataccattcaatcggccggacaaactgccttgattcaatttcgccgttttgaaaggcttttaacagccggtcaatatccttaaatgaatcggcaaacatccctctcgcaaaatccgccgccgtttcttgcgagacatgatattccggaatgctggttccgaccgataacacatatgccatgcccatcacctcttcacataaaggtttccgcttttttcctgaatgtatgcataagtttgaagcgaggatttcactgacatgccattttaatttaaaattggcccttttgaatgataagccgctcgactatacttgatccattcataaaaaaaggttgtgataagaatgctgaagcccgtcattcttaaagggtcactcgttcagttagagccgatgacgattgatcacactcaggcactttgtgaagctgcttcagaaaataggacgacttacgcttacacccatgttcctgacggaatcgaagaaacaaagcgttatattgaacgtacgctttccgattatgaaaaaggacttgcattgccatttgcagtacggaatcttgaaacagaccgaatcgtcggaagtacgcggtttatggatgcggaagtgtttacgcggccggcggacgcagccccggaagtgtgtgagatcggcagcacatggtatgcctctgccgtacagcggaccggtgtcaatacggaatgtaaacttctgttgctgacccatgcgtttgacgcgtggcaagctgtcagggtgacgctgaaaaccgatgttcgcaaccagcgctcacgaactgcgattttgcggatcggtgcccaatttgaagggatccgccgcgcgcatattccggctgtcgacggcggcctcagagataccgcctactactccatccttcgggaggaatggccttatatccggcaaaacctttctggccggcttgcagcatataactgaaaaacctgccgatatatacggcaggttttttacatattcggatcatggacgtataaattgagatcgatccgtccgtctgacgtgaccgctacgccctcagcttcaagagacagcttctgtacagaaaatatctcttcatctcttaatccgatttcaccctttgcattgatgaccctgtgccaaggaagacgatgctttttactcatggagtgaagaatcctcacaacctgcctcgctccccgcggacttcccgcaagaccggcaatttgaccatacgtcatcacttttccttcaggaatctgtttgataatggctaccgcccgttccgtaaatgtcatgtaactcctcatttcgcaagagcagatgattttcgagaaaatcatctgctttctgatcttatttttatagatgataattgcttcatcatcatacttattacatctctgcgtttaaatagattatctgtttgttcacaaaaaattaacaaagataggcatgtacatgtttaacataatatgtaataatacaattgtattaaaaaagaaaaggagtgtttgcaatgaaaatgaaaaaagctttagccggctcagccctgtcactcgctttactctgttctgccgcccctgcttttgccgcaggtcctgctgatacaccttctgcagaaagcaaaacgaaggaagtatctgctttggcgacgttcatacttaatggttatggccctgattatcctacttcaatttaccggaatggaatcacctattatttagacaacatcaccttccatggtgctgatggcacttggacagccgtctacaaaagctgatttttcatgacggcggaatgattgtctcaagtaacaactaaaaagctgctaatataagggggctttgcccctttttttagtttcactccattttataattgatccagcatatagcacctaggtgcgtaattttattacatccgatgatcattattagttgtaatgtttctgcttttagacgcaaaaacacataaactaaaattctctcccgcgtgtctatccaaaagccgagtctcaactctatcaatccagaacattttatcgacgcctgagttccccagctaacgttaagaaacctcttacttgctctttcatttttgataaaacacaatctagggtgataacatgagatttgcttgggaagaattaattataattgcattcggaatgattttactgagaatttcagggagaaaatccattgcacaaatgaccatcgcacagacaatggtgatgatttcaatcggtacgattatcgttcatcccattttagaaaccagtttattgaaaacattaatcgctgcgtctatccttttagtgctttaattttgatggaatggtttcaagtaaaagtaaactggattgattttttttaaccggaaaatctaaattcgatatagaagacggccaactaatatacaaaacttaaagaagctgagactgacagcagatcaactcgaaatgcgtttaaggcttcttggcatttcaattaaatatgccactttagaagctaatggacaattaggctacgaattaaaagatgactgtaagcctttaaccatcaaagattttaaaaatgtgatcgacccaaaatgtcttaacaaagagcctcagccacaaaaagatgatcaagccaatctattcgaggaaatcaaaagacacagactcagcacaagccaaaaaatcttgaataattcgctgattagtaaaaccttttgttattcaaaaccaaagccgaatcagaccgttaaccgcgccgatcattttttaccagcccgtttttcaagaaacaaaaaaacatctgaagcagatgccttttttcagacgagatccttgtatgcgcctgaatatgcttttcagccgctatacccaccgccggccttagctataatgttaatcagtttgtttttataaaatcattgattaattgatcagtcgttaatattgtggcaaattcgtcatgcaatgtagccagagatatattgtgaatagtctcggcatcataatatgtatcattttggtctttcattccgaaggctgctgttgcatctgaaatgaggtaggtatcaaaccctaaattaccgctcattcttgtagttgttgaaacacaatggggcgtagtcaaaccagttattacgacagttgttatatcatttgattttaaaatctcttctagattagtcccgataaagctgctgtttactttcttggttataatgacctctttatccataggtttaacgatctcctttatagcaaccccctcattttttggataaaataaagaaccaggtttatcagaaatatgttgtatgtatatgactgtccatcctttttctctccataatttcagtattttactaatgttttcttccgcttttacgttatttcgttctccccattttttataatcgaaagctttttgtacatccacaatgattaaagcttttttcttttctgccaccagataacctcctatattgaaaattagtatttataacattttaaataaagtttttacttttgtacaattgtttcagttttaaatttcatatcacacctttcccgttggaaaagcgctggaatagctaaatcaaacactcactcaaaggctgcagctcaccagaggccagcaataatcaactctttttctctatatacatatcagtatcctgaaataagctgcaacagcggatgaaaggattgccccttttgccatccactcccctaaaaaaattcacgctgcgcccacaaaatattaacaaaaaacctcttggttattattgtattttgtgtaataatacaattgtattaaaaaacaaaggagtgtttaaaatgaaattgaaaaaagttttaactggttctgccttgtctctcgctttactcgtttccgcttcccctgcttttgcatccagccctggcaatacaaatagcgactcaactgaaacaaaaatttcgacacaagcgatcaaagattcttttacaatggattaccttcatagatgggatatcccaaatacaactgttaaaaatggtgttacttattaccttaagaaagtagagataatcgaagggttctatcgcgcaacttttgaaggatggattaattaaaagaaggggcttccccttcttttcactctcttttgtaaggatccgtgcacaagacactcccctcagcgcccattctgcagttgcacttcggcatcaggcatttcattccatgtctaaaccaagtttcgtgtcatcaccgtccgaacaatgatattcgtttatgatatgatcccccattctcctttttttcttacattcagtcatatgttcacgtacatatagttcgggacggttgttcggcgaaataaggcggatgccgcatcactcaatttatttcttttcaaacaatgaaactaataaaaaaagaggatgcctcacaaaaagttcagcaaactttcggaagcatcctcgatctcgggatttcataaagaaatgttattaaaatgttatttttttaagaaaaacggataactaaccctcttgaacccttgtcacatcaagggtttttttcgttttaggaatcatattataaacaatattcaaaaggacggcggtaaagcttccggcgacgattccgtttgtggtcagcagatttaagtaagacggcaggtgcttaaacatatcgggaacgacagttacaccgagtcccaatccgaccgaacacgcgacgatcagaagattttcctgctttttaaagtcaatttgactgagcattttaatgccgtaggaaatgaccatgccgaacatggccaccatcgcgcctcccagtactgaagacgggatgatggtcgtgaaggctgcgattttcggaaaaaggccgaatagcattaaaagtgcgcccgtgacaccgatgaccgcgtttttcttaatccccgtcagctgcacgaggccgacgttttgggaataggccgtatacggaaaagcattgaaaatgccgctgatgaacaccgccagaccttccgcgcggtagccttttgctaaatcacgttcagacaggcgcctgtttgtcaggtcaccgagagcgaaatagacgccggttgattcaacaaggctgacaatggcaacgattgacatcgtaataatcggtgccgcatgaaatgtcggcgtcccgaaataaaacggtttaatcatttgaatggcgtcagcattcgccacattgtcaaattgcacttttcccataaaatatgcgatggccgtcccgatgacaatgccgattaaaattgaaatggatttcaaaaatccttttgtaaaccgataaagcagcacgatgatgacaagcaccgtaaatccgagggcaaggttagccggatcaccgaaatccttgctgccttccccgccggcaatatgattcatcgcgaccggcattaaggtcatcccgataatcgtcacaagtattatagtttaagtacaacaaaaaaagagccggcttaatggctcttttcttttgctaataaattagacattacttcattcacttttaggttgactttcttaattgcttcagctgatggttgatttatgctttcaatcgttatatgatatttttctatttcaaacgattgctttgaagatgatttaacgaattcactcatacagcgctcacactctgctgttcttttttaatcaaatcatcgcaaagcttattcaagtaatatgtatagttaacttttttcttcatcgaacggacttctgtgccgatctcttcacaaattgcaattggaatgctggctttgtttactttattcttatatgtatgtttcaattgtttttcagctatgttcttatatgtaaggaaatcattaatatgtacgaaataaactttattttccggctctctaaattgaaatagaaacccagggattacgtttggatattgcgtagcctcttttaagtgttttatctgctgcggctttataatcttctcttgaaaggcaatagacttatcctttgttgatttaagctctaatgggaataagtaccccttaaagtgcaagaagcaatcatatttgttttttgatactgcagctcccctttttaaaaacactggattaacatctttaattctatagaagaacagcttttgacctgcagctgatttttctatatttgcttcaaaaaccttgccttggtttgtacctcccaatcaatcactctcctaaaatattgaaactaaaattgaaattagaataaacctttgctacactgttttatgttaattaatattgaaagaagtgttcgaaatgaagcaatggacacccctgcgccctcgtttaaatgaattaatgtttgaatatgacctcacagttgatgaccttttcaaacgtacaggataccccagacaacgtatccacgattatataagtggagctaaagcaaatatgaacttagctactggcatgacttttgctgatgccattggttgctcaattgaagagctgtacgaatggaaccacgaagaaagaagaaaagttaaatcttaatccctttccgagcccatctgatttcctgcatcaattcttcattattatccgaaaggttgattaggttacggtgggctctttcgtattctttgttctcgagagcttctttcaccgtacccatttgtctttccattttgttgaacagtatttgaatgttcttaatgtactcagttattactctccacctctaatcatctaattttatttttactctaaataaatgaccgattttatctaatgttcacttcaccttatttgattcaaaagacaagtgtacccgtatccaataaagtgcatcgctcgcttcatgaaaatcacctttaaagaaattcttcgctacactttttaataagtagaaaatatgtctccagtcgtcaaacttaaaactcataatcctctttatcattgaaataaccctccccaaatcactcctgctgcaatggcaacaatgaaaactgaaacaaatttaattacaccaatatacactgcaaatttaagattcccttcggaatccattcttgctaacaaaacaagcccaaatgcaacaaacaaaatccaagctgtaacgatcatctacttagaacctcttccaactgtatatccgccggcaatgtcatttaagatcgtggtaccataagaaacctttttactctcattgtctttatttttagtgtaattaatgaaatcatcgaactggtttaaatacactccgtaagctgtgttattcaatttataaacggtatcgtcacttggtttcaaaaaccagctgtcagtaccttgtccatatacttcaaaaacttgaacaatttcgtccttatgctcaaagtaagccagcttattttcaagttcacattcctcatcaactggatttccaacatgatttgtagcatattccatcatagaagtaagcatgtagcctaattcgacgtccgagaagcttaactgtggtttaggtgttccataataaatatctgcttcatttagtgatcctctttggttcacttctttaatgatctcttcgatagctctgtagccttcatgaatgatgaattccctacgttcctcatctcttcgtttatactcctctaataaacttgttaccttaaactctgtattcttcatctaattcctccttgtatgaaccgattatttctggtatccgttgaaagaaagtaataatgcaatccctagcatcatgtgggtattcgcaatcaatttcggcaccggatatgtaaatttcatattctatgctggatattagttgaggattataaggtagctcgaactgtaggcacatcctcagattaggtatctgttcattgacaaacttcaaaaacttcttctcatactcaggaacctgttcatataatttgtttgcaagctcttctatggtgtctgattgcaccttataaaggttctcaaacaatgttttgttaatggtcattagctcacttaaagcttttacagttttctgatttccagttagagtgactccccaccatttaagttcctttgtgatactctcttgcatttgctcccataagaaattgctattgtacccccttagtttattagaaagttgtttagactcgatatgtgagccattactgaaatgaatattaatctttctctctaaactattgctcacttttgactaacccccttaatcgttcaacttcatcaactaaccattcagcatagctaattttaattttcatcatctttgttgatctaaattctctagacattacttcaacaaatttcttaacttcatcaaattcaatctctttcattgaacttatcccttctaaatgaaatcaacattttattcagtatcaacaaattcaaatcttgatctgaaaaattcatcgtgttcataagccccatattcattgtctttagttgcaatgatatgttcttcacctaaatcatcaatgatttcaataccatcatcggttatacgaaaatcatattttttatttaatgtaaactctttgtcatgacagtctgtaacatatttaattttcacattagacattttactttctcccttctgtataaaattagaatttcatttgatttcaaatgtcttcagctcaaacgttttatacgtatcaacttgcttacctggtatctcatttactctaggatacatatcatagtcatatggatatccaatgcagttcatgtgaaagctcgttccatcattgtcaaactcagcttgtaaatgatcatgaccacaaacccaatgttttgcgttaatgaacgggacatcaaccatatagcagctgttaggctcaaacggagaataaggattgtgaacaggtggaacatgtgagacaaatacatcaatgtgagagttttcaagagtgtcataccagcccattgattctttccacattgctcgtaccccatcttctttgctgtatccattaaggctgatatagtttgaatcattagagacacctttgaagaaatcccatccttcatttccttttggaagataccacataacatctcctgcaaagactttccctttgtatgtatccgtagactttattaatggagtgacattattgatgtctgtagccttctgaattaaatcattcacccttcccaatgaatcggaatattttcgttgctgatttttactgagtaaataaagatcatgattaccatatgtgaagtaaaccttttcatactgctttgctacttcatcaagtacccacagtgtctgttgattccactcagtaaaatcaccggcaatgattaatacctctccatttccattcgatatcagccttctaataatctcccttgttcgcctttcccatttaatttggtcattgtcccaaggtatccagtgattaatatgcagatctgaaacataatcgattttcattttatcccccttctttgtttaagtacgtgttaattcatgctccatgaccaattgacatttaaatcccctcactttaaattaatgtgtatatttacaaaacatctccacacaatacaattgaacaagcttgtttacatacaactttaggagatgatcatatggctcaacaaaacagatcaaacaacagcaatgaattacttgtgcctcaagctgctggtgcccttgaacaaatgaagtatgaaattgcttctgagttcggtgtgaacttagggcctgagacaactagccgagcaaacggttcagtaggtggagaaatcacaaaacgtttagttcgcctagcccaacaaagcatgaatggccaatttcattaatgtatgaggggattactcccctctctttttatgctcctcttccaaatccataaagtactactggcattgtattcacctcctttagtgaacaaatgtacttcgtctaaccagctcgtttaaaacgatttgaagttttcttctttggtcttttatgtatgcattgttatcggtacgcaatccatcattaattctattttgtatgtctgttttcagtctctctaagctttcaattggtaatttttctagactaactttatatgattgattcattttaatagcccccagcaaaaacgagtgaaattatcaataaccaaaagactgctccagaaacagcaagaaagctttttgcaatactcataaactcttgaaaatcattcttcaacgactctttcactgcatcaccttctctttaaaatacagattttacttagatttcagttgttttgaactcttgtttactcaacagctctaaatagacacgattacactctgtaagttcatattcttttttctgaagtttcctttcaagctcagttatataatcgagaagcctaggaatgtcttgccgagcgtttgcgatgaagtccgcgtcttctttagttactgcagctgctaaaccatcctcaagagtaactatccaataacgaagattttcgttccctggccattcatggtgaatgtttgcatgccaaaatcctttggttgtcgcttccatacgttgacggatttcttcgagttgatctttcgttaatttttcattcattcctcatctcccactttcaattaatttgattctcaatttcctcaataaatccctctaaagcttcttcatcaaccattacttgtccaacctggactttgatgatttctttcattcggtcatccatatttctaaattcttctgcttgctgcacagtaaacattgatctgtatttctttatgtataaaagaaattctttaagtacaccgatctccccaattttgtggagattggaatcttcttgttccacttctagccggagtaaagctgcttccttttctaaaacatcaatttcaagctgttctttctttgacagcaattcttgctctttttgttgcaatatatcacctccttaaagttctcaccgaagaaattcacactccattcagaaaattcaccatatattcacaacattctccatttatttcaaaattaattgttataatatagttgtattacatacctaaaccaagggagatgcttttaatgaagaaaacagcaattgctttattagtttcaactattggtcttactggtgtagctgcgtcagcgaatgctactgctaaaagtgagccggttgccgcccctcaaaataatcttgaggtcttaacaaacaccggtagttttcatgctcttgggactgatactcacgttaaaaatggtgttggtgaagtcaacataggtagatctacttcaggccctgcatcttacgcaacagtagtcactagctttacaccaaacaacgtaaccaagatttccatcatggggaaacaatggtcaacagggacaggaagtagaagtgcaaatgtgacttatgaattaatgaagtcagatggcactgtgctggcttctgttacaccgagtggcggaaattatattagtgaacaattttacaaagtatttagcgtaaacacatcacttatttcaggaaaacaattgtatgtccgagcacataacaatgacagtgtagctcaagtaaaagttaatgttgatgtttattgggattataattactaatacattgagagggcttccctctcttttttatttaattatgtaggcttgtttttaaaccgattcatactgtaaatgcttgtttttctttttgctaattttatattctgcaatcttcagtgattcaagagtccatccattattgtttaaacttccgaaaagcgtgttcagtaattggagctcttgttttaagcttcttcgctttctcaatatcttttgacctttcaacgaaaggtgatatccctctgaagcattaaatttgtcctcttctagcttgtgataaaattcattgagctctttatcaactttccctagctctttataaaggttatcaatttcattttgaagtcgttgtttagtctcctcaattgcaacaagaggtttggaaatggaaacaagataatctgttgcagttttcatatcgccactcctatttattattttatttttattctaaaagtatgtaaaaaaaagacaagcttttaacttgtctttatcttatcattcaacttctaaaaagtctataactattttatttttattctaaaattattttgagtaagtcacaaatgaataattaaatgtggtattgttgtctgctttcctgtgatccttttcaattactctccagtcatcatttaacctgggaaaatatgaatctgccttctcagcaactgaatcaacaatcgtcaaataaaccttatcagcatgtggtaagaatgcctcgtatatagcacctcctccaattaccattacttcttcatctttatccaattgtcctcttataagctttaatacatcatcaatcgaatgataaacaaatgaagagtgatcaggcttgaaatccttatttttagtcaatatgatattctttcggttctgaagtggctttcttgtaatgtttacgattgaagcgtatgtaagtctcccctgaatacacaactttcctgtagtgagttctttaaaacgtttcatgtcttcaggaatatggtaaagcaaattattttcatacccaatggccattgatttatcgcagcaagcaataagagatagcattatactgctacctcaaagtaaagcttgtctccatgcttataattaaccaatttgaaatcatcaattgtgaaatcataaaaatcttttacatctggattaatccataactcaggtgcttcatactgctctctgtccatttgaatctttaaattgtctatatgacgagtatatacatgacagtctccgatattgaagatatactcacctagctcatagccagtaacttgagcaatcatacgctgcaatacattgtactggaacacattaaacggattcccgagtgcgagatcattactgcgacagaaaacttctaaatgcaacttcccgccttttacaagccattgagtaccatagacacagggagtcaatgccattgagtctaattcatcaggattccaaagcgttgtaatatgtctgcgtgatgatggattatttttcaactgatgaagaagataatcaacctggtcaaccttttcaccgtttagcattctgttcttcttaccaagctgatatccatatgctttgccgattgtaccgtcttcttgtttccattgatcccagatatgtacgcccatcttgtttaattcgtcaacatcatttgatttaagctgccatatccaaagtaattctctgattgccgttttccaagcaacttttttagtcgttaaaatcggtacttcggaattatcaaagcgcatttgcttactgattacacttaatgtatgtgctggtgttccatctgtatcccacttggttctgacatcgaattcttcgtcagatgccccattattaattatgtcatttatgattgtgttgtactgcatatcaaactgagtcataattctattctcctttatctaaaccaactgataataaagttaaccacgaagacaatattaccgcaaacaaaaagcatgtacacgaacttgttttgtttattgtttgagtcaccgtccaaaacatcaagaattttaaacattgttaaaccggtatatattaaagcaaaagctgttcaagctaacattagcaagttaccatgcgtaatcagtccaatagtagccaaggggataatgaacgaaatccccttgaacaatgtcatgacatacactaagttcttattcttcttcagttctttatatggtgagttagaaagcaaatgtgtgactttagcgtatacgttctgttcccctcgagtaattaatctaatttcattaatgtttagtgcaaataagtatgctgcaagtattaacgtaaagtatgtaattataatacatccccctattttattttttagagcagaggaattaaatccaactgctctggttaaatttattgatagatcgggtcgtagcagtttctatggcaccattcaacattgccatgcgtttggtacatacatcgttgaaaacatcgttcagcactattaaagtgggcaatgtatggtgtaaattgtggcaagtaattcaaagtatgcagcgacggtgtgtaccatattggatattgtctaaacacattaaaacctccagttcttcacagttttcaatgtattgtatttaagttcacacccaatcgatacttgtcactgtttatatagccatgtttaaaatttaaatatcaatcaaaaagctcgccggctctcttcatgtctttaatttcttcacttacactttctttgattgtgtgaggtaactgatcaattctccgttggattcttttctgacctgtatttcttatatgtaaagttaattctttaaacccttccattgattcgtctgaaattaaatcaaactgatgttgaatcttagctaataagcttatgtattcttcttcatcttcactgaataattggaggccttgtttaaaattttctatttcttttagatgggcttgtattttctctatatgtttatccatttttcttcacatactctttgacaacatcgacaatttcatgagtattgtggaatacagtttgccctaatgaagtggcatgagaataaagagggtgattatcaatatttttaatttcttcttgtaaacaatcaagaaggattctttctgttttcactgacacttgttctaacagccaactgttcccgttgtccatagaaagctgaattcttatttctggcggcaagttcttaaatgcattaataaagtcgtcaaccttatattgatcagtaggatttagccttgttttaattgaaattttcattttcaaatctcctttttgttttaatttgattctaataaactcaaaaaattaactgctgcaactctatacctttggtcttcttcataagctgcaacttgtttcatatgctccaaaaacacatctgcaagcccttgtttttgaataaaccccaaacaaagtccgtttctgaagagcatatcatcatactttgcttgcaaatctttatgactgttattgtttatggtctgtttcctcctctttattttaaataaaagtcttcttttatagagatgttcgttcaatcgacaccctttggtatccctaagatctttatcaactttagtcatcacaatttcgcttgtttctaaattttgaacttgtacatattccctttcctgtctacatgatagtgtccttttggataatatacatgtccatctgcatttaccttatcaattacattaaacatgaattcgccctgttttatattccctgtcatccacgcctttttgcgtaatctttttttcatccagcatctcctttgtaggcataattgttgagttttttgagtattttaagttgtaccctggctgagaccctccactgacaaacatcatgatcaaagccaggggtttaaactaataaataatatctgccacgtatttagaccaagattctaaacgattaaatactaatggattatcaaaatcttgtttatttaaccaaaagccttttaattgatctgtttctcttacagatacctctgcattttcaggcagtttaacaataatcattatgcctaaatgaactttccccacttcatttaagtcatcgtttatcaaccccacaacttctaaatttaaattggaagttgagataaacacctcttctgaaagctctctccttaagttctcatcaatagcttcccaaaaatttgttgcttcagttaaattcatgtgcccgccaacaccaattgataattgatcatgaagcctcttttccccgctttttcttaaccgctcgtatgcaaatactcggtctcctttttgtaaaatggcatagggaattggttgcttacagctttgatccctctcagcatctcccctattcatagtgatcatgctttcagcgagattttcgattatttgatcaaccttgcctagatcagattcaattccttgaaagactagttcttcattatcaaatactttatctctaggtgctacaacaattacttcatccattttccccatttaacattctccttttgttttattatgtgaaaaatctatccaaaaattaaataggccgcccaacatgaatatcgttgaataatccagtcaatatgcttaatcttacagaaggttatccaatccattatcaacaaaggtattacagtaattaaaaaaattaaaagcagtatgtacttccaccatgaaatctcgttaatattccaaccgaatatggttagccctcccctaaggaaattatcttttattgtaatccctttagtagttcatcaagttcttcaggcttaaatccaacactacgctttacttcttcttgctcattcagcagtatagtcaccggtacactcattacctcaaattgcgctgccacttctggcttctgtgttacatcaaatgtctcatattcgactcctgcttcgtttaaataattggataccattttgcaaggattgcaattcggttgttctaatttaatcagtctcatgaaataactcctttgctatcgaaaatgaaatcagaatcctttaatggttcaaccgttgcttttttatagccaacgcctttcattgaaaagaagtcatgtgatttagtctttgtgctcaatccattaataacgattggattaacatcctcttcttcaaaccaatgatcaaagcccagattgtttaatgctttatttgcgttgtatctgatgaatttctttacatctggagctaaaccaacctgatcataaacatcttctgtatactccaattcattttcataaagctcctgcaacaagcttaaagcccattcaaacaattctttttgcatctgaagagtttgtttcttatatatctcttgagctaacaatccgacataaacgccgtgtatcgcctcgtcacggataattaaatttacaatttccccgctctgcatgagcttcccttgtccataaaagtaaagtggataataaaaccctgagtaaaacaagaaactctccaaaaacacggacgctaccattgctttgaataaggaaatatcatcgtttttctgaactgcttcataaattgaaacaattgttcttgctttcttttgaagaaatttattgtttttaacccattcaaacacttcgttgatctgctctgttggagctaatgtaagaaagatgttgctgtaagattttgcgtgcaccgcgttttccatcatcgccatgaaattaagaaccgcttttcgctgatggccctcgacgtgctcggccacaatcggcatgcccgtgttcccctgctctgtatcaagcagtgtcaggccggcgagcaccttcatgtacgtatcctgctcatttttacccaaatacttccaagtaagaagatcgccgtttaatgcgatctcttccggaagccaaaactgctttacgttttggttgtaaaacatttgggtgaaatcatcttcatgctttgaccagtttgctgctgtatattgcgtcaattattcatcctccttctctttaacgaccatattgaattttttgatttttgctactaatccggacttcttcgtctctccacatctagcgaaaggatacgtactatctcgattccttcctagctttgattcgacgtatttatcgaaactcgcataatccgcccgctcccagaagaaaattttagcccattccggctgctcatcgaatgttatgctttcgtccttaaatgagtctgcacaagtatccactactcctccgtagatcctaaagttttcatgtgggtgcttttcactgacccactcttgaccgatttctaacttcacgactccgcctccccttcgtttaaactacgcaactcaagcacgaatcctggccggtatctttcgtccgcgcataatacaacgttttaatgccacgatgatgcgcgtataaatcaatccggttcagatcgcgcgttgtcatcgtatctttcaagaacagcgtaaatgaaatcccttgatcgacgtgctgctgaatagtggcaataagatcaactaccttaaacatatccatgtcgtatgcttccttataaaagaaccaattctgagccgataaacctggcattggataatatgtcttactgtttccgtatgtacgttcctcgattctctccataatcggcattacaccggctgtagatgattgaacatatgagatgcttccagtaggtgcaacagcttgcctatacgaatgatacaacccatatttcataacatcctctttaagcttcatccaatcttcaatgttaggaatatgttgatctccaaacaggcttttaaccttttcatatttagggctataatcaattgtcacgtacttatcaaaatactcgcctgatttgtaagttgatccgtgaaacttgtagtacgtctcccctgtttcttttgcaatttccattgaacgttgcagggagtagaagttaaccatcataaagtatgtatttgcaaagtccttagcttcttcactttcataagcaattttattttgagctaaaaaaccatgtagattcatctgcccaagaccaattgatcgcattagtgtatttgctctcgcaacagctggggcatttacaatgtttgttttccttgtaacagtcgttagtgagtcaattgctattctaaccgtggaagcaattgattgattgctcattacgtttacaatgttcatggatccaagattacatgagatatctaaaccaatttcgtcttcctgatcgtaatctgtataaactgagacttgtgatgcttggagcacctctgaacagttgccagtaacaatcccattgaaaatcagagagtgatagtcttcttgtgttgtatcataaacatcctcaacaccatcttcttcaatactaataatttcagccgtaaaatcatgctttggctttcttgaagaaggttgcaatgtctcagttagcaaattgaatttataaatatcgtattctttcatttcaacaatgctcataaacaactctcttgagtttctatcttgaatactgattttgtgagttggctttacattgtacagcttagaaccacctttcccgtcaggaaggagttcttgtgaacgcttattgttagaatagatcgttgtataaacacccatgtttagtaatagcttctgaacgtcctgaaggctctcatagtgaatggatgttaactcaattgttaatgctttggctttatgatttgcatttacacacccatcagtctggaataaacctgataaataagctgcttgcgtttccttattagcttgaaaaatgaattctgggactcttgttttagtttctttgtccataccgaacttcttcaagatgtcaaataagactgtactattcatgtagagtaaatcttgtttttctggattagccatattaaatgttggagccagtgatgtattgtgtttataagcacgatcgagcttgtgtttttgaataatacggtgaactgcatcagtaactttctgctcaagaacttttttgttatcgtataaataaatcttggcagttttttcagtaatggttccatccccagctataatgcccatgatgtaagcaagatctggctcatgaatgtcgccgtatgctccctcacctgattgaactaataatttatcgcccgtttttagctgattcaattggagcttttgaatttcaccgtcccttttcacatagaatttgtgccactcagttgtccttatttcatatccttgcttcgttttgactttaaatatttccgcatcttttttagtcaattgcattggaattgcatctactattgaagtacctttgctgccaactgcaaaatcttttgttctattatcaatgaccactttaagctcattctgctttttgtaaagatcagctgctttttcatatccattctcagttaaaagaagtgtttctccagtaacgcacaaattagaaaacttcacttttgaaatatgttcatttggatgcactttatttacattgtcagcaaacatgatatacggatatcctgattcgcttcttagaatggccaattgctctaacagttttcgagcatttccctttgcttttctaactttagggttttcaacaagctcatcatacattttattgatttccatctcatcaagatacttcccatattctttgtagactgagtgaggatagaacatgtaaaaatccttatcttctcttgccaattcaataaatttatcagggagaactacaccaatagacagtgttttaactcggacatcttcatctgctgagatttttttggtatcaaggacgtctgtgatgtctgggtggaatacgcttagataagctgctccagacccttgtctttgtcccatctgatctgcatatctaaaagcattatccaatagcttcataacacctacgacacctttagttgcattctctacgtctttaatcgcttcacccttggctcgtaatttgcttaggtttaatgctacaccaccgcctaatttagacagctgcattgaaatgtcaattgcacgagagatgtcattcaaactgtctcccacttcaagtaggaagcaacttaccatttcacctcttcgcttacgtcctgcattaaggaaagtaggcgttgccggctgatactcttgtttcatcatggcgtgtacttcctcaatagccttttcataatcaccatctgcacaatataaagctacaattgagacacgatcctcatatctctccaatatctttgttttgtcgtttgtcttcaatgcatagtcattgtagaacttaaaggcactcatgaaagaagggaatctgaatttgtaactgtaagcaatcttaaaaatcgatttaatctgctcaaatgtgtattcgcttaagaattcttcttcgtaataatcatttttagtcagataatccagtttctcttttaagtcatggaaaaagactgtgttctgattaatgtaatcaacaaagtagctgtgtactgcctccttatccttctcaaattgaaacttaccgtctttctgaatcatgatctcattattgagcttaatccactttggtattgtgtttgtcaataagttgtacctcccgattaatcttctgcaaatcttgttttgttccgcttagttcaaactttaataacaatggtacgtggaacattgctgagagcttgtccccagctaaaccatagttatcaccccaaaccttgttaccactcacaacaactccttttattttatttttattcttaataataaagtttaaagtcctttcaggtacttccccaaagcctatcgtatatgtaatatgtataaattcttcttcaatgattaagtcatctgtaatttcaatgacatcgaagtttaactccctttgtaaagcttgagcaaaccttttcacattgcctgtcttgctttcatatgtaataatcaatattctttatattctccgttaaccaaactgttggtggttgtttctgcttcattttcagcatgatgaaaagcttcagacatttctaaattaatgtctcccatttcagcatagcctttggccatttgagcttcataatctgataactctgtcattggtactggaatgtagttatccttctgctcttgtgtgataaccatttgatccccttcaagattagtcgcaatcagctctccttttaaagcagtgtatgaaccaccattcttcatatgtacttgcgtattttcttttgcttcatccaaggttacaaagtgactgcgcttaacgtataactgtttagcagctcccattccacaactcccttttctttattttttgtttttatctttgtcatgtcttacgtctaacttatccatatcatttagaatatggtcaataacaacatcgctgaacttaccgtagaccttatatccaattaatttgcttctcaaatctctccactttcttgctgcactcattttgcttccccttcctttgaaactgtgattttatctagaaataactgtagcctgttttggtttatcaatgtatggatcaatcgttttactcaaaacatactccagagttttgtatctaccttccttattttttttggaaacatagaagttcgccaagttcatccagactaatgctgaaaggatcattacctaccttttctttaaatgcagttaattcactgaatttttctttgaattctataagttgctcttgattcaaactatcgattttatatccaagcatttcaacaagttcaagtcttctgtgttcaattagttcccttaattttgatctcaaacccaagaacttttcgtcttttctctgctcagcaataaactctctaatattcattttcatcatcctttactttactctcaaagtttcttatctataatacctttaatgctttttaatgtttgcttgtactcgctatccaagccacttacatcaagatttgttgagattcgatagtttcctgagttgtcatacattgtgatgaaagcctcagtgtcatcttctttagcgctaaacgtgatatcatgaacgtcaacctgatctgcaccgttttcttgctttagttcttcaacatagtctggctgcatcatgttgaataactctttaactgtggtgaattttacttgttctaataagctatcttctttgtattcaaatgtctcaaaataaagattgaatgttatatagccttctacaagatttccatacttagtgtattccatcctatctactctccttttctgatttctcttacttcatgcggcactccactttcttcttgagcatacacagcatcattatgagcctcaatagcgtcatcataagtgttaacaagtgttcccatgcaataaagtccgtattttttattcattttcatcatcctttcgtggtctttgaagtttattgatactttcatacagcttcatgagctcatttaatcttatttccacttcttcaaaatcatatcgactttgaagaaacaacactctttcccttaatagaagcaacacttcactgatagctttatcatgaccaattatttctgcaattgaatttgtttcattaatcgattccatgatatatttgccctgtctttgacttattcccagatgaattcacctccttgtatttttatccgttaaagtaaactgccctcgattagtaataccatttcttcatcattagaaatctcttcaagaacctgcttaaatggcataagctcttcaccttctcccggaacccttccttgtcgtattgccgcataaacttgtccaacttcagtcatctcatcacttaattccccgtcatcatcagcaacttcttttgtatataacttcattgccttttcttttgagtaagctttaattaacgcataatagggatcgctcacttcgaagtacttcataacgggcttctcaactcccaattcctcaacgtaatcgcctttgatttttacatcatcaacaccgttttcgagtaaattatctacgatatcctttcctagctgttctaacgcagccccttgaacagattcactttcgttattaaatccctcatgagcgtaacaagttgcttttatttcaaaaactgctgctttaatccccatagccaattctccttttattttacttttgtgaatctcttgatctctttcccatcaataatcacttttccaaagaacaccgtcttggccttcatatgtaaccaacttttcttctgtttcagtgtgaactgcttctccaataaccatatataaaccgcctttataatgtctatcctgacaaccgataaaacaaatgtgtctattgtagctttcctccttaaacttcatctaaatgaaacacaagaacatttttatatggatctaattgaatttcattgcttgtttcttcaccatcaattctgaattgaattggtgtatctccgttaaaatcaagttggtcttgtagcgctttaattacatcgctaactttaggattaattaatttcccattgatctcatcataagccatagctattcctccttttctctctaaaatcatccttttattacgacctacagaactgtgaattcaattttaattaaatcagaagaaatgtcagttaaccttttccttgtcctaatagtctttgttttgccttgacaagttgtgatttctaaaatcgtaggatcttctatatgaatactagagtcacttggtttaagatcatctttatttgcaatctctaagaatacactcctttctccttcatacatttcacaatcatcaaaagtccctaccaatgttttttcatttggaagaaaaacgttttcagtcgttttgtacagttttacatttctcattttcattcttcttcatcctttcaataaaataaaactttcatttagacttcaatcaactgattggtatctaacctttggataggttgttttcatataaacttttttcatgcacaatgggcattgaaacggatatttcggtgggtttgatgtgagcatcatatttgaaaacacaagctctggagcttcttcgcattcatcacaatgtaacgtctctctaaaaactttaacttgctgcgatttaatcatattcagattcctccttcgttaaataaacaatgtactgacatacagaacaatcaatgcaaaagctgaatgaagtaaagacttaccggctttcttgaaaatgttctcatctttttcctgatctgaccgttttacacctttgacaaatacgttgagtaaaacaccaatcacaaatgcatgaggtaaagtgatatgggtattttgaatgttgtatgtatcaataagcaatgggtttaacacatgattcaatccataatagacaactagtgacatagtcactgcttcaacaaaaatgagtaaccccactacaatcagagaacctgatccgataaagaaaccgttccaaatatcttttgtatccttattcaataaatatctctcctttagtcttttttagtgattagcctcttccaccaggaagttttacgtttcttttcttgctctttaaagcgttcatagtcttgtttaacttgctgattccatttctctattttttcttgtttttgaattgctttttcaaggctctctttatcctcaattgttttaatgaccttgtcagtctgatatgtccattcattttttgtgttgcgttgcctgtctgttacgactacgtattcgttaaaccctgggatatacactttccctccgacttcaattgggtctaagtcgatgttcccttcaaaaaatgtctgatactcacattgctgctcgattgggacaagggcatcacacaagcctaatgtccaacttttcttaattaccttcccttcaaatgttgctttatgtcgtcccacttattcacctcctactgttgcatctctttcttaaaagcatgtttcaaatgttgccaaaatgatatccttttatttcctagctgattatcatgcttttcttttactttactttcgtctaaatactcccttaattgtttttcagcttgaattttactctccttattctcgactgtgctaatgacataatcagtgaagtaaatccatcccccatcaagcattttgacctttttttctatatgaacattttcatcaagttcatttatgtaaagagtgtcaccacagttaacttcaaaattaatttcatcctcataaaaagtttcagtagatatatctaaatactcgtggtcaatagctggtggctttcgtttcgcatggacgccatgaaaacacgatggatatgccctgaaaaggtaaatcttttctattttcttgcctttaaatactgctctacacttctccatgttagtttcttccttctcacatttcattaaatgccgttattgccaccaacagttgctttgcctcaacttctgctatttgatctccaatttgaacctttacccatgtatctggataatcaatactcttagttgccaggagtttcagagtttttctgtttactcctctcaatgtgaattcggatgtaatgtctctcatgtttttctcctttctttataaaaattgaattttaacctaatttctccaagataattttaagataatctttgaagtcaatagctacagcttcttcaccttctacacgtttctcatctcttacgccaaaaaaccatctatcacctacccactggcttgcagttatattatttctcccgaacacatcatggcctttgaaaggatttgcctcttctattttctctagcatagaccttatgtctgtgaaatacttagaacgttttttaaatgcatagaagccagcttttgtggggtttttcaccacttcatctttaaagaagtcatatgcttctgttcctgcgcgtactccgaaatactcggaatgatagaacgaaaaaccattcttaattccgtatgttgcttcgaattcatcaaagaatttgttaatatcttctcttcgtttcttctcagttttataccaattgctttcttgcttaatctcataaattggtgcatctaatgtttccatggctctatgctccttttttgtttatcacctaaagacatcatttgttccaatttgtcgcatactgcgctttcccaggaaatcatttatatttcctttcactatttcccttcatcttgttcatatcactgtaagaataaatccgataaggagcgagcaagctcccattaagaaaacagtgagataaaatggcaaggcttctttaaagtttttattctcaactaaacttgtaagtccattacctatgaatattgaaccgaacaagattagtcccagcaccaaatatgacatttcattctcccttcttataatggactagattattactcatggtattcatacgcctcttgaactgcattaaagtcttcattatctaaaacatcctttgctacttggcaccaatatcctaaatcactaaccgcttcaactagttcattaattgcttgatcctgagtaattggttttgaatctaatatccagcctccattaacagttctttctaacgtatgagcaccttttttatgtaaacaaactttcaatttatccatttagcatctctccattctcgataaaaggaatattttatttttactcttaaagtaactgcaagtaatccaatgtcttttctaatttcatgtctttacaattttcaatgcattctttcttgattgcttctccgcattctttatgtaccgcgaattccttatattctttgttgtcagctattcttatgtaataaacgatttcgccaatgtgatccttgcatttaacacactccaatgcatcacctcgattcttatatttctaatatactcgcattctctcaaacaatcaacaactattttatttttattcttaaaaagtttcttttaaatttcttagctttactgttgctgccaaaatatccgaatcacacctcttccatatacggttatcctctggccttaaattgttctctaaataaacccaaagcttatctaatatttcctcaatctcatcaacgtcattattaatgatatccctggcagtatccctaattatccgatacctcctctacgagaatatgattatagctttcccgttgtcattctttatgtacggcgaatgttttctctgaaggcaatttgtccccctaccttccccaatgctcacgttataaacagtctttaccttatgtatgtctaatgccttccgtttagcctcttctgtagacattgcttcaattaccaaagacgcgttttcgcctttgtgatctttacatctaacatagtaccttttcaataaacatccctttatcctttcttgttatcttgttgtattaatcttcttttagataagacttgaagaactcatctaggtttgcagcaatcgctccagcaacttctgcacaatgagcatgactcttttcttgagatcttaaaaactcaactgcagacttagcaatggcttttattttcccctcgtctaatttgccgcttcttacttcatctttaattttttcggcttcctcttttaagctttctgggtagttcactacagactccacctcttatattttatttttactctttaaaagacaaattttatagcgatttatataaaggaaaaacagtcctgtcaacctcatctagataaacctctatatctctcctatctagattccagaagacatttttcacaataaagcacctcttatcatttatatctgatgacagatctcctcctacaatatagtcacctgtacgaggcaccattgactctaatcttaggtggtttccttccccatccttactatatgtaagctcactcaaagaactgccggttttacaatcattaaaaataactaaccatctaacttccatttcacaccctcatttcgataaaattgatcttttatttagatcaccaaccgtaaaataatattgtctctttctcaaaatctatggtttttaataatctgaccagctcaaaaatactgtattcatatttccaagaagatgttagccatgaatcattaatatccgtatttaacgcccatcctctagtccactcagataagttgttcttaatatgctgctcttgttttactgaagcagttccatttttatcatcaataagcaagttctcgtacattgcaatgactttgtttttataaatttcaatagcttcttcaagcccttctttaccaacaatatatggaacataatccgataattcattcataacttcttctctttcaaagagagggtgtccctttgaataaatgcggtcggctgtatcatcccaatacaacttcccaaactcccaaatttcctctttaggcaggttacctatatagaaataaccttcttctcctattgcaccgaactttttggacaattcattgtaattcattgattttatttcgtttacaagttccttgctgattttatacatataatgtctataacccattacagtctcccctttctctttaaaagagatattttaaacagtttcacaaacacttcacacatttcaaatatttaacatgctagactggagatgtaatcacaatcaaaacctaggaggtaattcttatgaaaaagttttacaaaggattgattgtttctgctctattgcttacagcactagcactccctgcattcacatcacaggcttctgctttaacccctgtcaaatcaattgatcaagttaagcagctaggtgatccgcttggtacagttgattttcacatgctgaggaattctaacgtatctctattaaaaggctacacccgatgggaaattgtatctggaagcaaccttataagcattagttccagtggtgtcgtatcctctcattcaactttgggcacagcattggtttacgcgtatgacattaacgacaattatgtgatttataaaattacagtagaagcacgttagtttactaaggagtgttaattcactccttttaactttattttcactctaaatataatgatattttaaagtaatttccgttcaatctcctcccaattcataacacgaataaatctattgtcattcctgttatgcggtgcatcaaatagtatcttcattccatcaaatgtttctaagttatgcactccgtcatcaatcatgatgtctgctttaattatgtttttattgccacaaagcacaacattactatgtggaatatatggaaaatgctctgtgagccattctaactttgctttaagggattctggatggtttgttgctgtagtaacaacatatacttcatatttcttcgccagctccttaactgctctctgacttccttctataacatccagatttctgaataattcgtaatccaaatgcctgtaaacattgttttgggtatttgaatatttgctaatatcccagcacagtatatcttcctcttttagaaaaggatcatcataggtgttaatgtaggctacccaatcacttagtaaatcggctaaaacttgatccatgtcaattgcaattactttcttcataaatcaccccatccgttaaaaagattatgcctttagcaatttcttcgctagaccactgttctgtatcccatgaatatgtatgtaacccaacatcgctcattacttctctgtataatcctaataccggctcaatatcacgatcatttatgtattcgtcaccacgttcaagtaaacgctgcttaataactttcggatcagcatgtaagtagatcaccttggctttatccctaatcttctcctcgatgaccctttgttgctcttccgttaagattgagtaatccttgaacttcttcgcataaactaaatttgaatatatgtatcggtcaataattacattgtcctcatcagccagcttgctaaagtgttcaaacagcttctcattaccgctcttagctaattcaaagctggatccttttattaccggatatccgagttctttgcttagcttatctgctactgttgatttgtagcagcagtcagtgccttctaaaataatcatcgtcatttatcttccacccttcttacattgctgaagccaatcactctatatgagccgtctggatactcaacttctaattgctcatgtcctttatcaacttgtgcaacaacaccaatctctcctgtgaaaccagcaatcaccttctctccctttttaaacatacaatcaacctcctttagctggatttaattcatgctccttgaagaatgtaatatcacctgtttcatcactgactgcgtaatcatatgtggcagagtgtagcagctcaataattttcccttcccgtccaacatgatgaggacaagcgttctttgcattctcatttatgatgacttttaacccttctggataagaccaaaacttcggcaattaatcgcctcctaactaataattgagattgtccccttttgcttgccaaaattaattgcgtcacgctcggttgctacaagcaagtccactttatttccaacaattgctcctccagtatcaattgcaattgctttgaactttttcccaccaatgcttacttcaactattgaattcaagggaataacactagggtcggttgcaataacacgataccctttgtaatagattgattgagtgacatcaacacctgttctagttgttcctgtgcatccttcttggcagtgggcaatataagcactcagcttaacctggatggttttctttgcggccggtggcttgttttctttttctttaatactaattttatttttactcttaaaaagtttatgctttaccgtctcacctcccttcctgtgcctttttttactttgcttaggtttaatgagttttgctgagataatcttctctgtatgcctttttaattgctgttctttgttagtttgagcttttttaaatagccgtaagacaatattctcacttgatggtatcctaatctgtctaggcttcttataaaatgattcttttattgagtcttcatttccctctgttttatgtaaatgttgctcataacttatgtaagaaaaagtggttaagggaatcaaaatcatcataccataaacagacttgaaaatgtgtgttttaattttatttttactcttaatggcgatgcatatcacttctccttctttgttttctttctattcgatattcctaaataatcatttattcgttttttggctatctctatgtaatattccttatcaagataatcaggaacttttaaatcaataacgttatcattatttataaagcagcgcggtggagtatttccgattttttcaattcgttcttctgttttaaccttgaaaacacctttagcatcttcatcattagaagcaaaaactcttaaaactttttcaggtagcctttcttctccatagagagcgtacatatatttgtttgaaacctttgatatcttttgaaattctcttaactgatcacattcattgatggttttttcaactggaatatcttttgtaaaatactcaatcatagctttattaacaattggtaagtcataatccaggttgtttagttttttaacataagcacctttagatttatacttctggtctttatcaatgattatatagttgtttacatccttctgataaatcttctcataaacatcccactctaaatctaatcgtgttctggtttcccactccttcgccacttccttaattaaatcaatatcagattctttctcaactttcataaacaacccatcagtatttgactgaatcagtttacaatacggttcaattttctcgatcaaatctaataacaacagctgcccggctaaacatacgttattggccattaacgggtcataaagtggattatactgatctttcattgctccatacgttgagtttaggacgatcttgtagggagcctgcttaggatcttttttgcgttttaattctaaccgtgtatctctgatttcagtatatttcaaagggtttttcacgttacgactgatgtaatcatattcaatcatgattgaaggatatagagatgcaacatcacaacataaaattatcccttcatctttatactttggtaatgccccatgtaaacctccccaggcaaaaatatgaggtacacctgcaacatcaacctttaagttttttttataatctagattttcaggatttctataccaatcaacaatgtgtttgtatttttcaatttttaatgtattaggaaatctaagttcaaactcatctcccctgtttccttgcttttcagcccccaagataaatgcagataattgggcttttgtctttgtaaacatagacatttctaaatcaaaggcttcaattaaagccaattgactttcgaattcctcttttttattatcaaacacttcaattgtttgtttcacatcgtgaatacagtactcaacaacttccttaatttctttttctgttaatgctcttgcgatatcaaatggtactgatgactccttaatccttgaacccataaagccttctagctgctttaagctgtggaaaccagttgttatgtcaaagttattcagtgggatcttataaccttctctaacaacattaaatccctttacattatcattaataattcttgaactaatataataaggattcattcctaacaggattccctttaaaatgtattggtcgtacattctagagttgtaaccaatccaaatatcatctttaaacatcttatagaatcgtttcagttcatcaacatcatctacaataaccttaccctttttagtatcataatcgatcagcacaaccatccagttatgtttaaaaacttcaaagtcatagaatatcttcctcatcattaccccctaagaaaataggttatcaaacaaatcggtcttatcctttttcttaaatttatttgatgatttatttaaaaaatccttataaaacttgcatgtttttcggtgaccacataagacactgcaataaaaggaattgtatttatctattttcactggttcccattgggtttcatcttcacggtctttattttcaatctttttaacagtaccagtaatataatctttcagttcattaattttctcttcagtaacttcgtattcaactaaacaatcttcaagccaatacttatttctaatctcggcaggtaagcagtcaatgctattttcttttactgcgttatctaacaataggtcaatttcgaaatcatcatactccaaagtgcgcatctctttttctagtttcattcgtatttcctttacccacttacctctgttacacattttctttttcactttggtttttccttgggtacatacataaacgtatttcaccatgaaccatagtattttatctacttttaagtcagttgtttgctccaatgcaagcttgtacatcaatagctgtcttcctgcttcatttaatttcttgccggcaaacttacttgatgtcttccagtcataaatactaacgtatggttttcctttttcactgggaaggattgcatctacatatccttgaagataaatcccatctgatatttcaaatacaagcagcttctctaaaaccattttgctgtcaattttattaaaattgtttaggaaatgaccaatgtctgctttccagctgtctccgattgagtcactcggaaagttgactccattcagctctaattcaattaatctattttcaaatccctttttaaattcaccaatgtctaattcatttttataaatctgttcaattccgttatgtaattcagaacccataagggtgtaaatattatctatgcctttctttttcaaaacgtatgtattgtagtattcatattcacagttattaaaggttccaagctttgaaaaggaataaatgtttttcccttgttgtctcaattcatttaatgtttctttcaatcaatcatctccttttcatatccaaactgtacagtctctgattagacggtgtagagtgcttttatcaaggtctgctggtgccatttttgatcccttaggcagatacttgttttcacgatcaaatatgtacccaacttcattttcaaagaaattttcaaactttaggctgttggcaatttctacgctatgttcttcacctaatccttcatccatcatgactaatgactttttcggaaacattgattttatgtgatttgcttgaatttcacttaaaaagctgcctcctaaagaaactccaacattcaatcccttacttgctaaggccattgaatgtttttcggattccccgatcataacaatgctcttttctctaattgaactgtaattttcaacaaacccgtatagcgttttggacttgggaaatgaaataataggcagccattttgtttcctcatcattaacttccttcttattaagacgccccattacaccacacaattcaccactaagagatttccatggcaccgttattcttccggaaacactatcgtaaccaacctggaacaaagattgagttaaaggtaatattccatcctcataaaacaacttatttggaacagatacaaattgatctaaaatgtcatcggaatacgtttctagatccaaatccattggattacttagtcttcttatattcttataaaaacctccgaatggtaactcaggtggtttatattcttcttcacttttataatcaactatttcagatatccttttgattgttttgggaaaagataaacccaatttattttgaacaagtgttatcaagtcaccttttaagttggttgaaaaacaggttgcacctaaagtggttttatttacttttactgaagtcggatttcttcctttttttctcgcacatctgtactcattcccgcgttcatcaacattgtaaaaccccgtctgttctaaaataagtactatgtactctggcttttcaataatgtgattcttaagatcatatacgtccatgatttcaccgtcccttggtaatcatgtccgctctgtagttctctgatgtttaggagtacaataaccgagctcattccatttattccatgcaccgtcaaattggtataacaacactgtatcgccttcgtcattccgtgtcttattcaaaaagaataatctatacttcttatttgggtctaactgaatttcttctttaatgtttgtaaattttcccgacgagtcttttttgaatctatagggtttaacatcgaattttcctcctgggaattcatcctcccataaaggtcttgttagaactaactctgaaacaatctccttaactgctttggcatttgataaacaagacgctgttagatatctcgtattctccatataaatggccaactgcattgtaatgatgatgcaaatatcctctttttccgcaacttgcaataactgttttgaggcttcaattagctcacctgttacattggttgaagccgcatcttcagctttaaatgtatcgtaaagcatataaccgaagccttgttttgccattcttctcattattctctttacatcattaatgctgtaatcatatatcttggcaaatttgatacgccccttgtaatgcttctcataatattcaattgccttttgtaacatttccttttgctcatgctttaggttgcccattttttgtttctttcttggcaaaccataataaccaagtttatgacttaaaattgttgccataaaaatatgttgccaagcccttttattcatttcattggcgataattgttaccttttcaccctgatctaaaattgacatgatataagaagaaacacaaaaacttgttttccctgtcccactaaatccagcaaaaatttgaacattagatttatgaagtccaagcgtgtgataattcaataatggacatgcagctgaatagcttaatcccatttcttccccgttttcaattgattcgacaaactcttcattcaaatcaagatcctcaattttcactcctgaaccgcgacctagaaaaacattatctaattgaaattcaaagtaactgtacaattgttgactcgtcatcttcttgaatttatcaagctcgttcgaaacattgaatcccttatcatgaagctttagtatcatgttaaatttaattagttcatcatagtatgtctcaacattttcatcgtttagtacgtgcttgagttcatcaatggttttcattccacctcgccgaataaaaccattttttaatgtttctttaccttctatgtagctgaaaacactcgcatcatcaaagctcttataattcatgttgctcagttctaaacctagagagtaataaaatttcccgtcttctgttagaaaatctctatccgccctcacgtggtctttataatcctcatacaaatcagggtttttccataaacaaaatataaagcttccttcaatttgtcccctgttttcaactaattcctttggataagaatctaagttgttcaatactcgtcctccccatccagaaactctgttatattttttggtgaattgttttgttttaaagatgtggaatcaacgatattagtttgatttacaattgcaatatcaagattatgatttttttcaatcattctctgattttgttcatgcagccattccttataaacatcattgatgttactttcaacaatcttaaaaatatagctaatcatcccatactcgttgtaaaactctttattagttaaccaatattgaattgtttgttggttcttctcaaagcaaatttgtatcacttcataatcataaaatctttttagttcagctatcttttttagaaaaattggaggaatgacttgaccctctctataattcaagacatctttcgctatgtagtttaagaggttttttcgtttcaccttatcattgatataggtttcatattcatccttagtacagtagtatttatttttccccttatcatcagaaaccctgaaaaaagtatcaacagttccattagctttacatatttgacatacacatcttctggccaagaataccctctcctattgataagggggagactccccctcttttccttcagttagataatgcttcgactatcttctcgaatgctgtagttggtacaatgtctacacctttaaaatctttcatattaaattgatccataattttcttcatttcacccttagcttcggcagttgcattagggaatagtgtcttaatctcttcggccaacctctcattctcttctttatcaataaaagatgagttgttaacttcgttgtgaatttgaatttctttaatttgctcttgttcttttctttcttcttcaatgttatttgtattatttttttgtttatcaaaagccacatggatagcttgttcaattgctttaataaattcattcggatctaatggaattgatggtgtgatatcggagaatcttgactttgaatcaatattaaagttgtcatctctaaaagtgatgattcttgattcatcaacaactgttcccactgttttgtcaggcccaattttttgttttactgttttcttttcaatcgaccgattaatagatgctactcctaaaacgtgcagcttggttttaatcgcattgaagtatttatgtgtcatattggttgtcagcatgtcgtattccaaacccgtaactacgtctgtcattgttcttttcttcgtatgacctaaaataaacatgctaataccgacctttttaagttcccacatcttctcaagaattaactcaataactttgtcttctcctgcctggaaaccaccaaacgctgctttaattgtattcactcttttttcaggattagctttattatgtagtcgaataacttctggttctgtaattttaattaactcatcaaatgtgtcatatactaaaacctttaaatctgcataatctgttgttctgtttttaataatatctttagtaatttcattaaaggttgtccaatcaggaacatcttcataggaggcatttgggatggcatcgatgccatcctctttaccaatattcaagattatatacccatctgctccgactaattcttcgcaaacttctttagctaaagttgttttaccgatccccgattcaccaataattccagtgttataatcgagaggattaactttaattttattctttttaccaaattttcttgccatatggataaacatctccttattgtttttaaataaatgtcagttaggtcttttcaaatcaagcaaataaatcatcaaatgcattatctttttcttcttcagtcactttaggttcttctttttctacgggtggtgtagaattttgaatctgttgtggaatatatgtaagatcttcaatttcatatgtagatgttgcagcaccttctgtaaaatcattagaatcattaatcttttttaaaataggttttaaaagtctattttcttcacgattttcgcccaatagccctcctttaggtttaaagtcatctagtgtgtttaaacctaaagcaatcatttccttttgactttccgtgagttcctcttcggtaaactcaatctcatcagcacccctgaaaatattcacaacccattgaaggtgatatacttcatcattttcaactttaaagaagtttttcaagagatttaatcgtttcatatgtaaatcattttcaaagtccaatttttgtgcattaatgactaattgctgaggaaaaaatcgatctttttttgcctgattatcatagctaagcacatatgcatcaacaaagtaccttttttcttcttcaaatgacgattcatctaaagattcacttgtgaaaaatacatccattgtggctcttagttgagatggtgtatcactacttacaatttcaatggttttgattttgaactttctaaaattccgtccattccatgaattgtattcaatattacctgtaattttaaatttattgtctttatgcttttcgagattttgggataagtactgaatagcatcgtattcatgaatgaattctgcaccgtttatgtttaattgtttatattctcccttgagagtagataaagttttattttcttcttcagtaagagagtctttcatttccaaccctctaattttaaacttcaattcatttaatttggtttttgttgactcatcgtttaagttaattaggatcttagaaaaatcagcaaccatgtttactgtttcttctttcaaccgatcttcccatggaatttcgagtcttgatcctttttcattttctgtacccttgctgaatgaaaacactttattttgtttgctttttgagtaaccaccttcaatctcaacaaaaacactgtttgtttttgactcttgaactgcgaagcttaatctttccttaacccatccgctgtcatattccttaatttcatggaatttctctttattgtttgaaataaataggttaccgataaattcaaatgtattataaagtttgctcaatataacgcctccgttaatattatattttatttttattcttaaaatgcctataatgagacttgctactaaacttacaatccttgataccaagtagcttgtttaattctatgtatctcttttttggaaagtcccaaggttcaggatcaccttttacattttcaatccttattactgttccatgtcgaattgtgatctttaagtttccatatgagtatgttttagaaaaaagacctcttttaattcctcttggtttaaattcctttaccaacatcacattcctggttaactttcttcttgcttggtcttcgtcaatgtcgtaattccttttgacatcatttttgtaggtatgtaaggcttcgacagatactttcagtatctttaattcctttttcatctctttcctcctttctctctttgggataacttaatcttacatcaccaaaacggatcggtcaataactattttatttttattctcaaaagttttaaaaagagttgagctactatctgcagctcgacaaagtgcttttatttagctggaaaagttgctaatccttttaaggttgttatcaatatgttttaataaatgaagtttttcattaaaattcgtatattcctctttagtgattttctttgctaattggtattgacttgaatctaattgaactttatgaccgagtttatctttaatgattacatgcttaacattaaatatcctgtatacttcataaaaagagttgatatctagatcatcatatttatttgcgctattgccactttctttaattctattgccatcaatgtctacaggtcgtgtatcgattggtttcacaaaatcacccaatcgaggccttctattaagagttttaaagtaaaccgtttcaccgtactcgttttttgctgttaagaaattcatcagtttctcctttatcgacgatattttttagaatacctcataaaagaagagccgcttaaatagcaactcaaaatgtttatcttattagcctcccactctaactcccatgactcagcctccaatagaattgatggacataataccactcctttattaattcaattataccatttacaaaggagtttgaataatcaaataacctcactccaagaccacatgttcattgtttgcagcgtaaacccatcaggaagctttttcattttaacattcacattgtatctcttcccagtagtcttatggatcacagcaagttcttcaccatcatagaaccgcacaattgcttcattaaattcaattggctgatcaaccacataaccttctttaagcgctctgatatacagataagggtctgtcttataaagctcatatagtctattaccaaagtcttcgtgtttatctctaagcagattaaaattaatcagggatatgtacagtttttcagatatgttcagcttgttcttgaaataccggattgcttcatcttgttctttggttaaaatattggccatatatccatctcctaaacttgttaaaactacagttttatttagaccacaatatctccttctgcagtcttcagtgttccactgtcatatgtgttataaattaaggttgtattctttgctttatctgtgcaatatgggtgggataataacttgccaccaattccgcgcacatcgtttcttacgagacgtaccttgtttgtattctccaaataaacaccatatccttggtctgctgaacgattgaacatgatctcattatcctttaatatatgttctgaaccaccagtcagttggatggcgattaatgatttacagaaataaacctgattctcactaatctggcaactgtatttctcaggggtgcctttaattgcaacattcctaggctcatgaatttcatttcgatgcagtgagacagaagagtctttatcccaaaagatgccgtatccactcccacttaacaacaagtcatttccctttaaacgaactgactgagacctttcgcaataaattccaccatatacattagcaaactcattattaacgagactgattcgggtagagtccattatctttgcagcataagacgagctcgttccttttcctttggtattcacaaccttaatatcatttgagtttctaacctggacttgaacacaatcactgttttctatcctgttgtccgtaattaaaaagtcctctgcttgatgtgttgcaatagggcatgcttttattttttcaaaagtattatttgatactgtgccaccctttcctcttacacaaatgcccacttcaaagccactaatcgtattgccatcaatttgaactctgtttccagactcagtacttgaaacacctaccgagtcaattccataagtcttaatttcattttcattgatgatcttgttatttttgatactgacatccgtgctatatccataggaaataacatggtcgctgtagtttccttcaataattaccttgccgcttgtgtgagctgtaacagatccacgtccattgtttttaaatctgcagtttcgcacagttaatttatacgggtgatcgtatttaattccgttttctccaaagccctctaaatcaattcctaattgtggcccaattgtatctcctccagcttcctctatatcacagtcatcgacaagaagaccttcacaaccattggtagccagattatttcttcttcctcttaaaagcgtacactttcgaacggttacattctttgaaggcgtatatgttcctgaagtgttcatcattccatcagccgctatccaaatgttgtctccaatacagtcagaaacttgtacattttcaattagcacattgctacttccattaacatggataccaaagccccattcatgcgtcttcttaattgaggtaatttttgaataatcatgctcatgtcgatccccaataatttgaccgccacgaatcgtaacattacttgcttggccgatataaaaacaggagtaaccctgataatcatttggctgcactttaaatatagcctctggatgaagtattagctcaatattcgaaggaacattgatacctccaccgaattcaggtaaccgctttgacgtattcactgcatcaattaggtagataccttttggaacatatactttatagaatgattttgagcatgcatactctaaagctcggtttaatccttctgttgtttcaattgcatttgaccctttatcatcaattccccaatccagagcatcaacaaaatagtataagggctgttgcatgttcatgttgtcaaacccttcccttctacattttcattgagaaaccctgatagagtgtcaatgaagttataaaaagtctcatttcttgtaccagagcgtcctttcagagaaaaggtgttgaacattgatttgcgtagtccagtgctcaattccagttgaatgctctttcctgttttatttttattggccacgttatttggactgctaccggatagcctcgtaccctcatctagaagctctgcagagtagccggcattatttaatgtacttgttatcgcttcagctttgtcccggtctgtgccgccaactagaacatgttgatcattacttgcataaccgtgaagtgacaatgtgaactcatgccccttcaacatttcaagtgcttgtggttcatcaaaattcgtactggttaaatgcaaatcaaaggctcctggtgtctttaaagcttcaaaaagatatgtagagtatgtttcgcttaattcctttgcaagctcgcttgttcccccttctatgccacctccatggggagcaagaattaatacatcagtgtcttgctcttttgagaacacgctaaaattgaacggtgattcattcgctttaagctcttcaaagttccgatacttgtccgctgctaagatactgattggattcatgaacgaaaccaatgctgtcaccaatactggaaaagacttcttttctgtgatatactttaatagcttcgtaaccttgcgaagtgtgcagattagagtgtaccgtccaaagtctctcttttctgctcctttagtcttttttagcaattcctctattttgtttttaatcctcaacaattaataaccactcctttttatttttgttttatttttaaaactcaaatcatataaatcgatcacatcgttatcacccccttaaataaaaaattacttttaactgatttgtcttaactgttcactcatataatcaacccattcagtaaaagcactaattataggttgtctattgcctgaatctgcccaccctgcgaaaccaataaaaccatctggattaaaactaattgcttctctttgagtaaaatagtgactgtttatgtaaagataacaactttttaaagttccatttgttttgtatttgctttttattttctgactcattctcattgtatcaacagacattgtatgtgctttaactgcctgtttaacatgcttattgagtagcataactaaagcacaaatatctccctccgtaatgtcttcataactaagtcccttttgcacaaaataatttcttgcttcttctgaagtcatttaaacatctccctatctggttaaatatcgtttttatttagactctataagctcaggatcttcgtaaatgttgccgatgacttctgctttgctgcatctgcagccagtatcgacatcacgagtattgtccacataagcaaacagtggcctttctccgatatagaagcccgcataatcttcccgatactcaacttctaagtattcatcaatatctttaggtggtttgcctgaaccgtacatgacaaccgtgactgttctttttaaaatatccccctcataaatctctcggccgtttttgtcttttaatccggtgtattgcccaactgtttccggcctgacactgtaagcaaatggaacaccagctttattagagatataagaaccaggatcaatacccatactcttgattctttgcttaatgattgataaattgccgtaataccattctccgttgatgcccattcctcgaaacttgatttctctcattcttccgcctccatttattatttagattcttttcttacccattttctaaccttaacttccttaagctcaacttcaaaacactcaacctggtcatcgtattcccatggtctctcctcttgtaactctgtagcgccttccctgtaagttgtctcataaaacttgtcttgatatgcaaacacaatacgataatgaatactccacctagacgtatcagtgatttcttctaaaattgaggattcaggcagccgcaattcatttaccatgtaatctttgtccaatttaattttcacttaagataacccctcttccttcgcagcatttacattcgactaaaggctcattaattttatccattagatcatctagaaatttcttaatattgccctttaaatcctcaacatctttgccactaaacggttctacaattgggtagctctgataggctttaggtgcaacattgtaaatttcaacttcccgctttgtttgaaatcttttctcaagtttaggctttctacgtttgtacattgtatttagatcaactacgtactcttgaggtttgcaaagctccaaaactttgaccacagttaaacagaaatcataatcactcgtgattcttgcaaacttagggtttatattggcttttatatggtttctgataatcttatagctttcttctcgggacaagtaacacggctttgtttcaagaagcattggatgagtttgaattctatccagtaagttataattcaagttaaaattatggctttgcaacttaagttctccgtcaatttcttcaattacattcatttcaaactcaattttttgattctgttgcgggacttcttcaaattttaaattatatagacccttcacttcatagtattcactgtcttcacctatgtaagaagttttaattacttgtggcgtcaaatcagtttcctggaacccctcttttaattcatacctatgattgatttttttagcaggcatttgtttttcaataacacttggctccttatcaagcttaaaccagtctgatttatacgtttcagttgctcgtttcccatcgaaaaacaattcatctaattgactatgaaaatatttctttccttcaatattgtcagacaccaaaaaacagttacttgttttaataccaattagcttcatcaaatttcccctttttaattttatttttatccttataaaatctctgttttatttagattcgaaaagctcagtatcttcgtaaatattaccgattacttcataactgatgacagtcgggtctgattcgctttttaaccaactcaaagcattcatctcacaatcaatccaaggccttaaatcaaatgctggatagttttcgctatccaagaatttaacttctccaacgtaataaggttcttcagcccatgtggtgtcgaaagtaatccgaattatatccccttcataaatctccttgccgttattgtccttcaatccggtgtattgtcgaaccgatttcaaacttttatcagcaaacgaaaattcatcaccgtctttatctgtaacgtaatctatttttccgttatcaaaagaaatgtcatgaacatcaataatttcttcgtaactgtctatacctgcccaatgcatattagaacccaaattgcttaatgtatgtttaactaccaacgcctgaaatttaatatctctcattctctccacctccttttattgtctccactcaaaaccgatattaacgtttgcttgtttaggtctgataacttcaactgtgctacctctgttagacagcctactttttaattccttcatatccttgtatggcgctatttgcaaggtgctcagatcgataagaataacttcatgtttatctttagcggcatactctctgtctagtgttctaacaatgtatacatcagcatcatctattttaatgaagtacccgtcctctaaatctttcacctttggcttatctgctttgttctttctaatctttaaattgatcgccattattctcacatccacttattttatttttatcaaataaatcaattatgtaggcttcgtacatctcatcccaataaggatctgttcttgctatgtatttctttactcttccattctccacaatcttaaaggtttgccccttttcaatatccgtgaacttcttctttgtccatatccctctgatcaacactacaacttcttttacctcaactgtttgccgctgcatcacattcctcctttttgattttcgtgtatcaagcctgtacaatattcaaaaaaccctaaaggatgatgaacatgtgtggcaggttcactttattttctgagtttgacgacatcatcgaacagttcaatatagatcaatttttgtctgaagacgcataccatccaagttataatgtagctccttcacagaacatcctgacaatcattaatgatggatcaaacaaccgtctgggtaagctaagatggggtcttatccctccttgggctaaagatgaaaagatcggctataaaatgatcaatgctcgagctgaaacattggccgagaaactttgcttcagaaaaccgcttgttagcaaacgttgcatcatccctgcggacagtttttatgaatggaagcgtcttgacccaaagactaaggttcctatgaggattaaacttaaatcatccaacctctttgcatttgccggcttatatgaaaagtggaatacgccagaaggcaatccgctatatacctgcacaatcattactacaaaacccaatgagttgatggaggacatccatgatcggatgccggtcattcttactgacaagaacgaaaaggaatggctaaaccccaaaaacaccgatcctgattatcttcaaagcttactgcttccgtatgatgctgatgacatggaagcttatcaagtttcatccttagttaactcgcctaaaaacaactcaccggaactgattgaatcccattaagtaccacagtcattttgctttatatatcaccttcgcttagctattatgttctaagtaggaggtgatattttgtttgtatcgccaatgttattgcattcaatcaaagaaccatttgatgacgatgattatattaccgagctgaagtttgatggaattagactgatcctctccaagtttaatgatcagataaagctttatactcgtcacaacaacgaagtaacaagcaagttcccagaactgttagatcttaatatacccaatggaactgttttagatggtgaaatcattgtagctgccccaggcggtgctccagatttcgaagctgttatggaacgctttatgtctaagaaatcagctcataaggtggtttactgtgtattcgatgtagtttatattgatggtcattcaatcgctactaagccactcactgaacgtaagagtatgctttcagacctaaaccttgaccatgataatgtatttgtaatcgaaggtctacaaggaaacggattagcttactttaatctggccaaagaaaagcatcttgaaggaatcgtactaaagaaagctaactccccttatgaaatcaataaacgttcccatagctggctgaaagtgattaattatgattacacagatgtgcttatcaccggctacaccaaagaggatataaaatttcttctgtcttatcctgatggtactgcagccggaataatggaattcatgccgaacgcagaacgaagtaaattccactctatgaaacatgtaaagtctgaaactgacgaatatatatttgtagaaccgatcttatgtaaggttaagcacagatttaagactaagcatggtaaactccgcataccttcctttgaatcctggagagtctaatctctccgttacataattccttagctcaaagttaattaattttgatgaaaatttagtacatgaatcaattagtttaacttgcccattcagcaaagctgtaggggtaatcaacactttcaatgaaaccgatctccttcgccttctgacggattttcatacaaccttcatagctgtaagcccatatttctttataatccctcagctcgccgtatttccctgttatgatgaattttctgaagctgttgactagttgccacatgttgcccccatgcgaaaaaccatttgcacgcccgtatcccaattcatatgggtaaacgtcagcgcccgtgtaatcatcaacgaagaacagttttttcttaaatctgaaatacgctatccgattctttgacttacagtagaaagtacatctatcaatacttgcgataagcttgatcaaatcgtttatgtcgttcattcgtttcaattgctctgctgttgccatctgcgcccttcccttctataaataactattttatttttattcataaataatcaccaaatgtcatagcctacaaaatcattcaaaatattcgtcattccctcatccccttcttctgtcaatccatattcatcaagcctgcttatataatcttctcgttcttgtttgatcattttttcacctcttttttatttttttcaattcttttttgattttcatattacttttcactcttttattaatagatgcgtgtcatacacatgccatctaagagagataggacatttttgtctcgggaggtgaaatgcaatgaaaattcttatggatctcttcacaacttggatttttgataaagtcatggattattcactaggtgctataatttggtttgtattcaagtccaagtcaaagcagaatgagtatcccgaagactttgaggaaaagcgtcgattcagactttaaattaactgactcgtattctgatcgctatcgccgagcgtaatgacttccgtaaataccacctgctcgaccggcttgataacggcttgcgcgatgcgatcgccttttcggatgatgtacgaacctttcgcaaaatgatcccaagctccgaggtaatcgagagcactgacgattttatctctgatatcgaaaagaaagtccttttcaatatctgtataacgatttatattgtcgacgattactccgacctctcctcgatagcccgaatcaactgttccgagttgcacacgcagtctagtattcagcgtaatgcctgatcgcggacggatttgcatttcgtatccctccggaatctcgaacgccaaacccgtcggcacaagctctgcccagcccggttcgataataacgtcctctgacgccactaaatcgaagccggcgtccgttgcgtgcgcataagccggaatctgtgcgtccggtgataaccgtttaatatttacgttcatttcgtttcctcctaataactgattaaaaattatcttttatctagacttgttcagctctctctatcatctctacaagctcttgtgccttgtttaattttctgctgtagtcttcaacttctttcttcgcgattgccattttatcaaataaaacgcgccagtttccattaggatttctgctgaatgatttaacaattaggccattaaaccagacgtctaaaattagtctgctctcacttgtttcaggtttatgaccaaaggcagcatctttattattaccggcataaacaatttgtttatttatttcatatagataattttcagtttcttttgtaactacatatgtattcattttcccaccccttatagattgtattgactgtctttaattgaattccaatcaaacgtttcaagtatgttaagcaactgctctacttttggtgccctccaagctgtcattgcataagtatgagcttctgaagtgtagtgatgcttgttcaaattgatgtggctcttcgcttcttctttggtcaaaaacattgtatccggccgtacaatatgaacctttctttctggaattaattctgcttcttcatcaatgtatttttgaatccactcaataggatcatcaaagtcgtcatttttcaactctgttaatgcttccttagatagctcactatcttcttttaaatcttccaaataatcatctaaaacatatgcttctgcaatatatggcaggtatacagaataccgttctgcattttcctctcgagcttcgacccattcataatcaccaactgtccagaaacgtggtgcagcttgtccgtcgttgtcttgatttttcaactcttgctgaagttcttttaaaaactgaatatcttgattcattcgtttcctcctattctgtttaaaatcacgattttatgtagactaaacctttttcttgctgtcatgcgttcacacttttgggtaagatactaatctgttaacagtaataactcatcaactttataattgtattcaccgtattcacccgagctccatttaacacctacagagccttgatttgtcacccacaatataattcccatttccccattttcatgccatcttacttgctgccctttctgataaccaagcatgtttccacccctttcttaaaaagcattttaatttaactttaatgtgtattgccttgagaaaatcccctttaattggtaaactcatacctaacttacatacgagtgggtgattccttgaataaaacaatcggtattgctggattaatcatcagcatagtagtgcaatcattttcggccgatgattcgctaacccaaaagattgctacgggtttgttatttgtatcaataattatctataattttgaacatactaaagattattctataaagtcacttgtaattttaggtgtttcctttattgtttttatgctagggatttataaaatcctctctattaccagcgattactttgaaaagcttaatgtgaattttggatacatcctcttatttgaaatagcattgattattgcattagtgtcgattgcagtaaacgtaatgaagtacattgcgaatcggttaaagaaatcacctgatggtaaagagctttgactctttgccgtttttaagctaaatacttcttcttatgtggtcttctatgtacaaaatcaaacgcaatatcgacttgtgccggttccttctcctctgctactcgctctgtaacaacgatcagttgtccattttcctggcggtcaatgctatggactgaatatcctttagcagcgtaatattcaccaataatctcatcaacgtggttgctaagcagattcctctttatcatctttataacctccacttattttatttttaccctttaaatatttatatgtattccatccgcagccatcaaatatgcttatatccgctccaagatgccacttaaaccaaactaagttaaaccaggctgtatcaattatgtatttgatgtatcctatgctaacgacatcctttcaactaatttttcaatgaattcttcttttctttatcaatatctttcttaagcatatcctcaatttcctccaatttatcaaccacttcaaatgtaaattcatcatcattggtatagcgaatctgatcacttgctttctttacaagctcaagcgcaacttgtctcggatctttatagttctcactcaaattcccacctcatttcattgaaataatccttttaaagtaattgcttagtagctaaaatctgatccgaataatgatttgcattcttcttgggtgaatggttcttcaagaaacaactcattttctttgttaaatgttatgcaaagttggttctcccttagaggaagtgggcaatcgccccgtccttcaactttaacaacgtcgcctactgcaatcgttcctcctgtaatcaattctttgaaatctaacgtgtcgtcattatgcgatccccaattaactccatctaaattcacaattttaaattcactcatgttatatccctcctcattcaggcgtatagcttatatccaattcaaaatcacatttcggatgcagcctccaaatttgatgtcctaagtatgttttcctagcgtaattcagacagttccttgtcccacttatacttccgtcataaacagctactattgcttcactgtgatcaatcatgtattcatttcgtttttgcattttagccggtgaaaactcacctggtacagctccactaactttatatttatctaattcttcaacattaataatctcatctgccacatcaagcatacgtttgtaccacattttttgttcttcagaccacactttatcttgttctttgaaaggtgttgcaattatgtttttaatatgtgggtatttcttctttagaatatgtacacaccagcaagcagcctgatcagttcctaacactccaccagttatgaaactggacttgttttccttagtgattaattcttcaattacttcaagcagcttatctttgagtttaagcattgttggatttttcatatcgtatccacccaatttgttcggcctatgaccagtgaagcacaccgttttctttcttaaagtctcctttttttgatatatccgctcacgttcatttctttcaatttccatctgcttaatatattcaggatcactaagttttttgaaagtgactatcggttctcaccctttctttaaaacagtctttttattgtgactgtataactacaattaaaaatctctttccttcttgtttacagttgaaccagccaagtcaagattaacattactttctttcatacatttgtataatttgatgtgcttcgtgctctgaaagcagaccgcccccattaaaacgcctaactatttttcgttttgctttactgagtggagacaagccatgttttttgaacaaatttgcgatatattgtttttgttttggtgtaatgaaatggggactatatactcggtcatcttgtcgtaaataagcttgtaggttagcttttaactgttcaccttgtcttactgccatatgaagatgcatattttctttatagacttctttcatatgatctacttgccttttcaaattttcattttcttcccttaattgtgattccctcatctttatttcccctcctttatatcatctgaagaacattttactttttattcagtttaataatgcttgacaaacccacttgtctaccccatcataaatttcgacttcgcagtgttgccctttttcatatttccaaattccttgatattcatcattaagtacgtcgaattctttagtttcttcatcaattaattgcgattctactagctcacacatatagctccaaactggacaacgaccgcttctaaagttttgtttctgtcataaacaactcggatatctttcactttataacagctccttttcattaaaaactcaattagatcctatttttaatcccaattaaaatgtttgggcctagcgacaaattcgtaattctcctcccaatcaaattgttttaacccatcttcttcaaattcccagcaatcaccgagtaaaggatcgtcaaattcaggaactctttttttaaatgttcgaagtttgttgaaatggctagctgttttaaatttaactttatccattggtgcaaatttcatcttcccatcaacctttctctttaaaattttacttttatcttgaattcatctggattccattaccacagtttctttttcaaaatcatttctcaacttgataatggaggttgactttagatatcctctgtcctttgtcttagcccatgcaaaaaatctattatgcaaaggagtgtaaaggcttcctgtattaaccgtatgctcatgtttgttgctgatcttatgctttaatcccctcatttgtttccaaaagttatagtaagggagcttaagttttgtcatgaagccggcatcatcttcaattacataaccctcttcctcaattgaaaagtcttgtgacacgtccagataccatctatagaaatctgtccagttactaaactctgcaacttgatttttgcactcaatggaaagactctctgcaactgccttcacttcactataagggagtttttcatacgtcatttgcctttttacgatgtctaataggactagtttgtctttactgtattcaatgatatgcggatctttttctggaagtgttacttcaaaaacgaatgaaacattatttagcttcagataatctttaatgatatttactttaaattcatcaaaggacttgaaaaacatatcttcaacccattttgcatgttcacttgttaattgagacgtaaaggatttagaagtgaataccaactgatctgacaaagagtcataccctacagttcctaaatatccattcgccttatcgaagactgttactggaaacttcattgtatccacgagatgatgcattcttgtttcagaccgttccccaatgttaaagaacttatcatagcttctgcttacaatttcattgctctcagtattaataaacaatccccttgccttaatatttgtttcatcccactttttctttctaaatgcttgctttgtaaaattaaatgaagagatattgtttggcatcttattctcttgcacatattcatgaccacgtaagtgtgaaatcaattcatcaattgttccaacagttgcactgttactctgtacttcacttgaaatttgtttaaagactttattcttcacttcatgcgtttcaattccgttctcagacagtgtaacgactctaagatgacctcctctttccacttgcccttctaagttatatgatctttctgctgctaacacaggcagacggtacatgtttctatgtccatgaatctgtacaacattttgacctgcagtattatttgcaaattcataatcaatatcgtctgaataatctccaactccattgatgaattgtgttgttgcggtcatcaagagattttcaggtacggttgaaactcctccatgagttacaatgtatgtagtgtttttatatgtaaagtaagctaactgatgaaacttcctggccaactgtctaatgtcttttttatcaatgttggattgttcgatttcaggtttagttttgttgttaaatgtggtgctaggtgtttcttcatcattcccatacatattgatatatctatcgtgatttccttccagaataatcacatttttataatctttaattttgatcatgaattctaacagctgtgcattttcaatacctctgtcgataagatctcctacaaagatgtatagttcattttcatttaaatcaccgtttaagtactcttgaagcacagtattgcagccatgaatatctccaaaaatatggatctttttataatcgtcaaaacatcttggcttataagtcatcgtgttttcgaactcatctggttttagaacagttacccaagatggcactttttctgttgtcattctttcataaatatttagaatactactctcaggaacatgtttatgttcagccctcattttatttctttttaagattctccgaacatcaacatcagaaaaatcaactacatgtacacggtatctatatttttgagctagtggcttatatcttgaaatcatactttgttttgaatgagttgcatcgacaattgtgaattcgccgcgatccatcctgtcttcaagcaatttcattaataaatcccacactttgttatcgtgtttcggagagatttcatattttccacttttgtttaacacaggtgactgaaacagtagcctaatgttgtccgcagaaagtgtgtattgctcaagtccattatctttgatccaagttgatttccccactcctgggcagcctcttaataacactaatgttctcaaattctatcaacctttctgatttttatttgtttaaaatgcatcttttaatcacttctttgcagcatagctctcaaagaattcttcaactgatcttagctaacggtttttatttggatcttctggatctctaaatcttttcgatagtaccaatgaccaattaaacatcaatggagaaaatctcgcccatttgctaaagcttaactgaagacctttccattctctccctgctaattccgctaactctagaatttgatcttcttttaaatttacttcttcttcaaacattacttgaatttcctcatatggtttatgtccaaaacaacagtggcgtgttttcaatccaatcatgaaattcaaaatatcaattaaattgatcatttgtgtatcaagttcatcatagggaatgccatttgtaatgaatttttctctttgtcctgctttcacactattccttaataacagggtagacctcttactcattccgcgccctcctcagtccaaaacaatctctcattcgttattttttccaccttataatttatgaggtagttattttttgcgtattcctctgcgtattccaatgcagttttatcatcattggcgccgaaactgagatgcttccatccgtacttaacttcgtaccacagcttatattcaacacgctttacttcagcattcactccgcgccctccaataactcaggattttgataaatgtctccgatgacttcgatttcacttagggatacgtccattctccaaaagtcttgatcgtctcccctattgaatacaaacgacccaagagaatctctaaacttgaccactgcttttataatcttgttttcgcaatagacagatttaaactttatgacgtccttctcgtaaatcattttttcgtttttatccttcaaccctgtgccccacatgagagccgcgtttctattcgtgctgtctacaacgggaaccaaaacatctgtgtataaacgtttcaaagtccaatcaccgttatttttgatggtaaggctcaacccttcatcatcccaataatgcatctgctcgccgtcccacaccctgtatgctgtgttcacaattcccgcgcctcctttgggttttcgtcacacatttcttttaacgcctccacaaactctttttcgctcatgttcagcggtgtgtaccactttataacttcgtgaaacggccggagataatttgcaagtgtatcttcagcatcttcccttccttttgttgtcccagtaaaattatttaaatagtcttcacgcgtcatatttatgtgcgttggacagtctaccactgaactaaatcggcagtaccgtccattcggttgcttagcgattaatgcacccatgttattcccccttatcttaatctctataaaacttaaattttatttttactcttaatacattcatgctgattcacaacatcacggagtatgtattgtatttcctctaaattgtctttaacaaaatctaggtctccaattgccattcttatttcgttattctctatgctgcgcaatgacctttcacatgacgctaagagctttgcatatttctttaaaaccatggttcttatttgattattagttggttcattaatcaataattaaagctatctcctttcctaattctaattcgattatataacctcaaccatatgttgtaaatacttattttatttttattctaaataattttaaaaaaatcagctttactcatactgtaaagctgctgtcttcataaacgtcttcatgccgtccagtttccaaagagtttcatttattttgtctctaaattctaaaactgaagcatgatccattctaatcctcaaacaatccccattgtttttaaagataatgtctatgtagtactctccactttgtatgttcttagaaccaacactcatggaaactgatctcataatgtctttcaagtcaatttcaagattaaaatccattgtatgctccagtctgactaaaaagtcaccaattttttatgtctcatgatgactgacaagatgtgtatgtgcttttattttattgataacagttgagaagatttatagccttcattttcaaacgaatcgtctatttcttcggcataagaggttgttatttcagcatcctctgtacacatgatgtctacatcaaatagtgcctcatatttttcttgatctttttgaagaaaccccattttccctgttttgtttcttaatttctttttaattgattgatatgcgaacaagagtgcttcctcttcattcttggcttttatcctgccaaaaaaaggaatgcacagctccccttgaataaaataatccttttctgacatacgtttccctctctctggtagtaattaaccgaacttatgttccctttttgttgacttaattataaccttttacctagttagtggcaaatcttttttctttcatttaaaaacttggaaagaattgatatagtatgataagcaatactataacaggaggttgtccgatgcttgaggttgaaatcggacaatgtttgatttccattctcctcgaaagtaaaggaatgtcattaggagaactttcaaagcgaacaggcattagtacgcaaagattaagtgactatgcaaacggctttagaccttctatgaatataaaaacagcgaaaatcattgctattgcccttaactgttcaattgaagatctctatgaatggaaaatcaaacattgactttatcgctagggagtttggcctagcgaacctccttgtaccctttttagggtatagaactattttactgcatatgtacaaatttgtctctgtctaactttgtcgaattctgaaaaatgtgaacaaaatcctgatatttttcgaaaaaatatcacgagtttatccgcacatgttttatttttactctaaaagttatgtaaagataatccctgcaacagggattaagaattagtctcaattacttcagacttgatacaatatttttctaagttatccatattcactactttcctcagtgattgtgaattaaactccgcgtcttcattcagaaacccgtattgtcgagttatttttttataatcaggtacttttaattcacccttctctttgtatatctcatacgccatgttgagctttcctgagttgataaggttcttaggtgaaaagaagggttcttctaaaaatttttgaaactggctaaaagatcggtgaactaaaaacttgtcagctttcatactctgattagaactcttgtattttagcctaaaaatgtttttgcttttaactaatgtagcaaatttgtttttaagaccactatctggcgaaccattgctaagatgataagttgtttgatcattagcacgcttaagcaactcataacatttatcgcttacagtaattattcttacaccgtgtttatcatctatcagctttaccttgttatcatcaagtaaatcgtcacctgttaaattcagtaactctgaatgctgatagccatctatgccttcataaatagcctgtatcatcgctttatcctgatcattaaccataaaatcaacatactcttctacttctttattggtgaatagtgtttttttgtttttatctataaactgctttaagtcaccatcctgtatctgatacactttgttgatgttactgtttgccaagccattttccattgcccaggttgtgtattgtccaattacagctcttgctcctcttagtgaatctatagatttgctatctaaatctaaaaataacgtacgcagctcttccaaagaaaaattaaatatgtctttttgaagtattttttctgtagctgagaaatcccttagccttagccaataatggtttcttgttgcttcactttcgtatttctctaaaaacttttccttcaattcagcattatatatttcactcatattaaattctcctttaggctttaaacaacagcaatttcatcataaaacattcgcttaagtttcttcttcataatattctttagttgattctcattattttgtcttcctaattcttcaaacactcttccgcttttactaaagtcaatcgtattaaggatattttcaagcttgtttagttctacattgttttccttcatcttcttggccaaataaacataaccgtaaaacattacgttatgattaatgtatgattgctttctaatggacgataaatcatcttcaagaaattcgtctgggaatgcataaaaaaggttatcaaaaaagtctaccaagtatttcgcaattttcaacgcatcttttcgagatttcaactcaaatacatcgtctatagcttcggataaagtataatatgttacaagaaaattgctatcaatagcaatttcactttgtgggcttattttatttttaagttcacttttaaatttcagctgctcgacaacggttgaagaataccgtttttgacccaattcttcaattctggatttttcaactgggttaattgtattcatttgagcaaagtgaaccttagccttttcttcatcgtaattgagcacatttaaaatgaatggttgatctaattcagggacttcagcaatggccttaacaatacctgaaattcgatgatatccatcaagagcatctaataaggttcctcgtgttacagtgagggtttggtcgcttgaatcatattcaacttcttcatcaccatcagatgttccaagacgagcgttaaaagttaacattgatacaattaaatcgcctttaataaacaattctttgatctcatcaactgatttagggtttgttttaggtacaggaataaggctgcccttaatgtactttccttctcgctgagtgttgtaattgtactgcaggatggagctattatataactcactcagttctttggcagtaatggaagtgacatagttatcctctttaattttaatcacatttttaaacttgtaggggagcttaactacttcttcaccggcgaatactctcccaccttcaagctcttttgccaatctggttggaaaataatttgacggatctaaagcttgcgtcccaagaattgaatacaactcttttgaaacaatgtacacttctttttcgtttaaacgctgtacgttgttatcattattatttaaaatttcttggatataaccagggagtgccttgtatttgtccgccattgtggcttttaattccttcaccatattgggatcatttttaatatcattaagatttttctctatttcagtttttaacttataaagtttatccgttgtcaacaaaacttcagacacattatcacctcacataatcatattaaatttatcattattttcataagcaagtaaagcttttatatgattatttgtatcacttgttcaaaaacattttaagtttattctgtatatacatgtctgattttaaaaagaattctttatattgctctaaggtaacatcatctaaaaaggacatgtcttctttttgatcaaccaaaacccctggatcttgagaataatccctttcattgactaaataatggtcatttaaagtattgatattgctgtggccagagaacgctgccacttttttaatatcaccattaatgctgtaagaaaagtttgttgcagtattgcgtaaactatgcggagttatctttctttctttgggaatgcccataactctacatacgcgattccacatatcctgtattgaatcaactgttaacttatgaaataaaagctcatgttccccatactcttgctttaacagcaataactcttcataaaaagcagtggaaatcccaactggtctagcctttttttgcttagtttttttaaagttgacgagatagcattggtgcttttctgaataagtaatatcatcccacccaactctaagtacctctgatttacgtccaccagtacgtgcactaaacaaaataaacatctttttcattaatctgttctgacgctcagtaacatacgctgcctcagcaaattcatcagcttcagatattccttcaaaagagcctgctgggttcttttctgttggaagaggtctaaaattaaatacagatgcatcacactcatgttcagattcaaggtacttaatcatacttttcagtgcggcaatcttattgttaattgttgaattggagttgcttttatttttagccaaatgggttcgataatcatacaggtcactcttcttaatcgccaggtcactctcagttaaatattcaatatccttggcagcatagtggttgaaaaactctcttatatgcctttcatacgtggctctagtattagacttttcaatttctccagtttctcgatccctgtttcttaaatctaattcatcaaaccacctatttatgttattgtatattgaataatcccttagtgttgacgctttcttttgagcttccataatgacacctcatatcatttttttcattaagtattgatcaaattctttccacgcaacaatccattcattctcaccttgaatattactcagcagcattatattggcgttacagatttccatttgctttaacatgtcgtattctttaagagcgttaattaagatgtctgcattcattttatcacacctaatttatttttatcctataataaaattcagtttaggacatttaccctctcgtccttacagacgtttataattggcatccccgtcaattcctcataaagctcctcttcgaacccaacccattcatcacttgtcgcttctcttcgtaggaactcattataagctactgctatctcaggctgctctagaaactttaaaacgatcatatgctttttccaaactttagccttgttttcttctgtataatatttattattcattttatttttactccttaaatacattttatagaatttttttgttctttaatgaggttgtattctttatgattttttctcattgtagttacattattaggtgtaaacacatctggatcctctaggtggagattgactcgtgtgaagttctttagttgttttatgtattgatattgtcttaatgatgtaatcttcaactcttccttttgagtggcactggttgtttccattgtttcatctcccaacaacgttcatcttgtaacttcattatatatgttgctagaataatatgcaacaatttattttatttttattcaagacaaataacacatcccctatgtatgtgttaaaatgtctgctgatttgtctttaatcttcattaggatacctttgctttatattttgatctaaccatttctgcttcattttcaagatgattatcttcctgggaaatttctaaattaatatctcccatttccatgtaccccttagccatatcctcataagaaagtacttgtccgaaatgctttttcattttaattcccccatgttcttgttttttatattatgaatttctggaacattctcttaaaattagaaaagacgcctgatccagtggatcaaacgtctagccaagttatgtattatctttgaagttaagccccgcggcttggtgatgcaacttttacaggctggtctacatggtctaccgatgctgtctcaattgattgctgtccggcaacaaatccaacagccattgctaacaagattactattccaagaataatatttttcatttaattcaccccccttcaattttagaccatgattaattcaagtagtttttcgtcacagcccattttccttagctccgctaatggaagattgataaataatttatcaccagattttttcaactttgcagtgctttcataaaaataattcttattttggtatagaatccccttaatgtaatctagaatcccagaatcatattcgtacaattccatattctcaagctcatttattactttctctgctttattaaattccttattattagtatagtaatatgctacctcaatcttatcagggatattatcagtgtcgaagtcaagccatttattatccttattccataggttgcttaaaaagcaaagagctaatcgcagcttatatttatgatgttcattatcacgagcaaattccaatcctttaagatactgctctttggctttagagtagctttcaaaaattaatgtgttcccatatgttagatgcccaaatacttttagtcgatttatatttgaattttgaataacttgttctgaataatacctagatttttcaatttcattatcatttaaataaatatttgcatttaataatgaaattctattcatatagcaatctttcacaaagccttcgggtaagtcgttgaaattgagaagtgataatgtgcttttcatcaatccaaattcgcctaccttcaaatactcatacatcagcatagcatttgagaaaaataacatttcatctgttttgcactttccggttgctcttattgcatcagttaaacttatcttactttcgctcaatcttctatgtatactgtatatattgccccattcttgacttgctaggttttttgagctagatagcctcgacactatcttgtctgttaacgtatcccattgattaatatctgagtattcaacagattgtctggcacattttttgttgggatccagtgataagaagtaatcacttagaagctgctcctcattatcaggaaacaagcttttaacaatattaattaaaccgcctaagttgtccatttctttctctggggtgttgatgaatttgtaaaaaccattaacctttttgtaccctgctatttttgagagtttcgctgcgagctggttgtctttttcacattcattcttaatcatctgcttaagattcattggttactacaccccttcccaactaatgttccctttgtttataatatacattagagttgtcagaattacaagtatttattttatttttattctaattattttttaaggaacccttatctgtttaaaattcgtattttatatgaaccggcacaataagaatccttactgtgccttaaagatatttagtcctagtttatcttttaatgcatcctgcagcacctgggaaaaattaatgttcttttcttcagccacttcatttaaccaagccggaatagttaatgttttcttaattgatttacgcctatactcatcacgaaatgcatgcataggcacatcaatcaaacacacaacttcgttttcccctgtcttaatttccgaaaacggtgagggactaggatacttctctccgtccatttccaacccgtataaatgaagacctaaagcttctttagccatgctaattgcttctgtatcattttctccacaagttatacaaccaggaaggtctgggaaggttactgtaataccatcattagcatagtgtaaaattgaggggtaagatacccaattcatttaaatcaactccttaaagaagattataaatacatttaaaaagtttgcaaattcaatacgtataattgaacgtagtatgtaaaccataaaaacaatataaagttttattcattaatttcaaaggagcaaaactttaatgcttctggtacataaagatcattaattggtctgtttattaaagaattatcgtttttcctccaaagaaatctaaactcttcttgttcagaatgcttactatctttaataaggcctggcaccaaataaaaatcagtgttttcctcattaaaagtaatgctccttgaatctctatatatgcaattattcgcagcatataaggcacaatttctttttttcattttattgtgtacccaatatgcgaaacttggaaaatcattaattaccattactgaacctccaaactttctcataatatttttatcataattgaaagttaaacaataaacataaaaatttttatttattattgaggtttgaaatgacacatcttcaagtctaactattgagtcaggaaaccattcttgtagttcattgtgaaggtgtggattatggtctcctgttttatattttttaatgtttaaatgtctgtttgctacaccttcttggtcatctccaacatccgcacctaagcttgactctggatagttattaaggtgatttacaaaaagtttcttgtccctcattaattttttcaaccatttcgcttccatgtatttataagctttctttggaaaatcttcaattggcatatatctcatcttacttctgctgtccaaaaaaatgccccctagtaacttttcaggttcttatgtctcatcagttgtatttttatttctgtcaacacttttaaagccgcttccattcaacatactcaaaccgctgctgataaaggtcttccaggattgtggcccattcaacccagccgtccacaacaatacttttcttctccccatcctcaatccattcaatccagtacacctgaacaccccatcacctagtaataacttcgatttgtctaatggcagaagtgacattaaactctgtacgcagctcgtttgctatcattaaagcttctgacattgtaatgaacttagaagcgccatgaagtcccttagatgtcttataaccacttccatctaatttaaatgacttgaagtaatcatcattttcaaattgaataacaaaaaaggtatcgataacaggcatagctaactcctcttcagcagaccagcaatttttatggccagtggcagcaatccaattaatatgtaaaacaccatgatatttattttattcttaaagaacagttcaatcatattctgctccatacctggtgaaaatgaatcaatcagttcctgcttaaactcttcatcataaacctgatcaacaaataaggccttaaatcctgtcagaaagcctacaccaagccagagcattaagaaatatgctattccaatcaaattaaaaccctccttatatacatcgtctggtattatagtagtgttaaatactttgtgtaggtgaaatttaatggaagagaaagattttgagactaatggctacgatgtaacagttgtatatgattataaggagtatcccgatgttaaatatggtcgctgtgacaactgtgattacgctttattcaagagttcagtgaaaagtggtgtgtttttacgtgagtgtcgtagatgtggtatgaagaagagcatttagtttaatgctcttttctatttcactggaatcatgtagcttacataaacttcaattccatcttcagttttatattctgcaatcctgtctggatcagtttcaatcttctctattagtcgtttcgcatccttgttcctctttgcaatattggtaactacaatccaagaccaataatcccattcagagatgcaagatttaatcttttttggtatcttatgacctcttgtataaaccttgatcatttacattctcctcacttaattataatttttacgtgctgttttacattaatgatggtattcttcggcacctgtagaagttaagataacagagtaagttgtttttccgatcattggatcattggttctttttattgcctccgaataaatctctaaaagtctttcatttgcatgataggcatgacggtttgacatttctgttgaaataaaattaacagtttcgcttataagcatgtcttcgtgatcaggggagttagaattaattttaatacttgaatcgatttctaatccaaggtaattatcatctgatgaaaaccccaacaattgtggtctttcgtctggtttaatatatccaacaaaaaatacggaaagtgggttaataccagaataatatgcttcaaaacatgattttccgtaattaaaagcttctctaaaaaataagagtggatcaatattactgttcaaaatatcgcttttttgatcaataaaatcaaaagctttttctgcaataaacattctacctgcaaaagaaattacgtacttcttattaataatttttattttcttatattcatctgattccacttttaaaattcggcccaagctatttgtagtagtcactcttttgtcagcagtcattactatgctattgtcgaatttaactgctattagcatcgtcatttgatatctaacccttcaaaaaagtattcctgactcaacctgacttacataactggttaaaagactggtttcatttcaacttaatcaatccttgaaaacagctcgttcattactctgttaggatcaataccattactatctagattcttacttagctgctccaataataggacaatctcttctcgattaaatttaaattcttccttgtctaagtctagtaacagttctaatgacttcataactttaacaatttggactggtgaaagatttagttcgacttcctgttccctgtcgattgcaactggaacagataataaagaagaagggacttttaagattctgcttccgaaaagaattctaaccatttgaccgttcaattcgtaatacttgtcttctagtcttccttgagaacctttttttcttatcaaggaagctttttctgacgacccattatagtaattatcatgcagcagaactgcagtaccggcagtcaagctttgtttttcttcttcagaaagttcgcttattttaacccattctttatctctagccaattaaaacccaccttaattatatttttcaatgattcttgaagcagcgtcattaaaagctgtttctggacactcagaattaaaaatatttaacaacttttcttcagtgaattcccttttcatatccgcgatcatttggttttcacagtcataagaattaaaacttaaatgggctaaatcactgagcgaagatgattctccttctgggattggccattcgatttgctggggatcatacatataaaaaccaccgatgtatttaaagctttgggatttatccatcctttgaattgtcgagtcgtctaaattcagctctgatatgaatctatacattatgtactctcctttattaattaagatgaaagaatgattttattcattaacaccattttcatattcaaggttgtatgttgctatttcgtgtactcctatatcccctgcaaagtttccatcctcatattcctgttgcaaataaaccgctttatctttttcgaagatttctcttgcttcaactaattcagttacagcttgtgaccctagtcgatctgttacagtaaaaactaagcaccgttttaactcggtaccgtctttaaggactacgtctgctatgacgtacccatttggctttagttcgccaatttcattgcgtcttttatcaattgcctcttgaagaaccacagaaacagtattgttatcggacttacttaaagccatttctaattcttcaatttcttcaagtaacacttgaatttcctctctcattttatctctccctttgttgtaaagtgcaaatttatgctactcctcaaagtgtctcgcaattattccactttcaacaagattacttttttatttccaaactctgtcaattcaatatttttttgaagaccctgatccaataagaagtgatacattttttctgtttgattatcctttttttcgtttggcattccccggaaagtcatattaccgcatgtataatagaggcagtaaccgtcgtcaaacatcttctcaaaagtgaaacccgctgaaatattgcttagtccttttactctgcttttagagctctcagattttttaaagctaccttttaataaaattcgctgaacttttgcttttaaagaagttggcaacatttcttttcctcttttccctatgaaagtacgattttatgtagacctataaaatttgtaagtatttactgttcttgtaactttagtataccatgatcactttaagtgatcaatatctttttaatcttttttgtaaatcaacagctcatgcagctcaatgtctaaatatgtacagactttatccaacagatcccttgggtaccgctccatttcatcatgatacagcttcctgactgtgttaaaaccatgatcaatatcattggacagctttcgaatactgatattcctttcgtctaatattggctttaaatttgatttaatcaatgttactacctcgcattcattatgtatgatcactttaaattatcattatatccataaaaaaggtcaaggatataccttgactatgtatcaagcttaccaatcaaatgaatcttcatgttcaaatccataaatacctttaatccacacatctccgcagcctggattctttgtaatctctaacacatgattacgattagcatctccctctactcgatctgtagcagtatagtcagcatagttccctacaaactgcttctcactacgtggaaatacccagccagcaagagttatcctactgattttcatatttagagtacacccttcagcattgttaattgtgaatttgtagaagagccaagtgcgatcaaaattccgatcaaaataatctgccattgaaaaactctctgaatcctcactcatgtgaaaatccacatttttgtagtctaatgtaagcttcgcctcagcacttggtgtgttaaaactcaatataaaaccaatgcaaatcacagccaaaaagattagctttttcattccctctcccccttttccaaattatactatattggaaataaaggtgaaagaacaggcagaggcttcttaatttatctgcattctccttgatatagctagatatacatgtatctatgaatatctacgtgtatttataagtatctatacctccctacatcacacaaatataccttattaagaacaaaaatatttattttagttcatttttaagaacaaatcttccatttttatgatataatcatcactgcttataggcagccttactgcttattcgccatatggtataggaaagaggttcttttaatgaacgtaaaacattctaactgtttctttgttatcaggctgtttgctgctctttgtgtgttgattggtcatgctacaagagatctaaatatttctgtctttggttataccccagagagcaaagcaatatttcacaccggcatatcaatcttcttttttctaagtgcattttttctttttacttcttatgagagatctcagcttaaaggtaataatgtaaccgatttttattggagccgaattattaggatcgcacccgctatatacacctatgctatcgtctccaccatcctgttaattgttctaggagctctttcattaacagtattcactactaaagagtactggacatggcttcttagcaattttgtgttataccctcaatacttccctgacatattccatcacatcggcacaggtcgccttaacgattcactttggacaattcctgttcagattagcttttacctggtgttacccgcaatttattggttttataaacgtttcggattcccaaaaatgattctttgctcttttgctgtttccgctttcagtgtgttagtctctttcataattttaaagttcgcgcctggcagtgtgttcggtaacctgtacttacattctttcctgccgcagatgttttatttcactttgggcatcttctgggctaaggcatggagcaagttaccgcagcatatcgttttatttttgtcttcggtaattttatttttattctataaacttgaccttctgcatctcagttcaataaacagcaccttatggagctttttatggttcgtacctctgagctatgcactcgtctggtttggttacaatgggccgaagatattgcgacagctgaaccggttagacgatataagtatggggattttcatatggcacatggtgatcatcaacatcttcttatacactggaattaataaaacattgtctgattacccgctgatcatagccctaattgctgttactgctgcatccgcatttctttcgtacagaatagtggaaaaacccgctcttaaattacgtaatatcaagaaaaacaaaccagtcaaaacaaggattgcgagctaactgcaagggctgttcttatgtaggcagcccgattcccgttttaaaataaagtagtgtttttgttcaccaattccattctccattaggctctcctgttggcttatacataagctcaatatcaacaaatgttttatgattacccttaggaaatctaaccaggacaatctcacccttttcaggaacaaactttacatcgttcctccaaaatttgattgttttatctccttccttagtaattggtgttgtatgataaccatatttttcggcttgagtgctagagatcacgttgcctccataaacatattcacgttgtccattacgtgattgaatttccctagtttttaaatcatatgcgtaaatgtcatattccttattctcttctttgtttaaatatttgtcattaagtgcttcactttcttggcttgaatcattgtcataataactttttctttcattttcatcatcgtgatttacctctaattgagtatccacataaacttttgtattgttgttaaatttactacactgaactataagaaataccccgataatacccaaacataaaattattaactttttcatcacttctcctttagtttcttcgtcatccctcatgctgttgtacatattttaaagtaacttaaatgatttttttatcgatgcaatacatatcgaatccttgttttataattcttgcctttccattagctgtagaccaactttcacttaaattttcaataaaagaaaaaagtttgtgctctaattttccgggcgtaaccttcataacattgcgaaagattttcctatagcgaaaactttcttcaaactcaatcataaattcatttaattccttattccatgtatccaacttttgatcattgagactgtaggaagatcggttaaatgagtaaggcggatctatagaatagagtgctactggcatacctttgtaaaggatttctgaatagtattggctttttttaactccccagctaaggtcattctccttaaaatacctattaatctgtgattctaattctttaaatcttaagtatgatttatataaggaaggattctttcttgctctagttacctgagcataaattgttggagcttctgttatcttggcccaaattgtacggtgtgttccatcaccgtaaacagcataaaagtcatcatcttcataatgaaccaatttcactggtgagtgttgataataagtgtgaaattcttctagactttgtttttttaagtattcaaaagctttttcacatcggccaatgtcaatattatctgtaccgttataacacgcgtgatcaaaccaagacacaccactggttcccctgaatcctaaactcttaattttttttaacgggacatcccgatatagtttttcgctgtttccgacttcatcataatacaattcatatggatactcacttatatttttggtgtccttcatttccttaatatgaaattcacatacacccttttcaagaagcaatttttcaagtttatttttcaaatttctccccccaatgacgtctcaatatcattgacaactcatgccaataggtggattttacattttttctttgcgatgataaagaagcgtttcgaattaaatggtgtttttatttagacaggcattcctcttaataaaatatttatcttattatcttctattttcaactaaggttgcgatacttactttataatctactgacgaagcattcttgtggtttgcaacgtcgtcaatgtcagcaaacatacctccgcaactcaagtcattaatcaactcgatattaaccaacggatcacggaatgccttgattctatttttatacttataaacttcgttaacaccattttctgcccacatcactaagagcaataattctaattcacgcatataattcccctttcctattaaactgctgttttattcagatttattatagagtttataatcaccttcgccatcctcatgatgtacgtctttcgattcgcattttttacaaatataactacctttattgaagatattgtctatacctgaatctgaatagtctacatcataaatctttccgttcctagctccacctgttgtatcaataagctgtttggctcccaccgatacctctaggtagaaaaaacgttcattaccacaatcattacatttagccattactccgcatcctcctctgcatataaatcataataattttgtttaattaagtatctacttttccccataagatgactttcgctacaaacagtttcttttgttttcttgtcaagaacagccgtaaaccctgccctctgttttgtttttaggactctgctattggtatactttaaataccattttctaaataaatcatattcttctattgacacttctttcattactgccattacttcatcatctcctgtataaaattgttgttttatccacttctttgataatgtttgtttatatctttaagtacaatagctttaattttattttcatgctctttgtctacaaaaatccttatcacattatcacagtctatgtgttctaaatgctcaagctcttgctgtgtatcaatataaataatatcccctatacgtttattcccgtatttatcaaagaaatatttaactccctcgtcatattccctgtcccatctttccatcctaatttgatcaattggtgaattagaggtttcattcgtaaagtcagattgatcttcctcatttattttagttgcactcactttcatttgaactcgttcgttaatttcttgagaagtatcttctataataagatattgattaataataaaatctagtgcgttaattattttatttagataaactttttttacaggcttcttaaattgattgtaagtcaaaggtacttcaatgtaaccacgggcaagtgtatcgtactccgcaaaactatttgaattatcatcacgctgaattaccttatattcaatgcaaaggctattagtattacggtaaaggctggtttgaagcgttgtattgttatctaaattatataggtcgcatgttgtttccatacttcctctgaattgattgaaatctacttgatatgtactcatcttaatgtctccattctgtttaaaatatgcattttattttatttttacccttaaaatatgtatgctttcgctgttgttttaacttgatttaagtatatcatgactattttaaataatcaatacttattttatttttattcttaaagtgtgtattttgttatgatgtaagcaagagaagcttcgatgtatccagtatataataagaagcgttatttaccgtatcactgtaagattgtgccccctcaaaatcatttattacgtctttttcttctgccgtcatatcctgatattttaccttgccatacgaaggaggaagccagtttttcttttggctgccaaaaatattgaacttcttaagcatttccttgtctttaaactcaatgtgacatgtcccttttttatagaaagttacatagaagtactttaattctatttttttcgtttcaccgtaatgcttagccagttttagagattcatctatgtttatgtcttctgttaacccgttgtcaaggtaattgaaaactttttcgatatctttcaacttttctaagaccttgtagtctgttggactatagtgaccgagccaactacaatacccgtttagtggaataattatttttttattaattttatatgatttatttgttttccacccattatataagtgcacattttttgatgattcatcatagtaatgcttgtggctaaattcttcaaaaaggttaagtattgtatcttccacgccctgcgtcatctctttgctcatctgaattctcaatgtatagatattgaacaaagaaaagtcataatcttttaattcctcaacgtgctccaaatacttttgtttcagattgcttgtgaagagccccataaattgatcattgttaaataacgtattccaatacttcgccctaatttgttttatatatgcattctctatgtcattttcttcggtattcttatcaattagcagcttcaatattggagtactgtcatcattgaaactatgcagcattaagggtttcaaactgttgtattcattgattaattttaaacccgctttgatttcatagttgaattgttctacaattccttttataaagtccaccaactgtgttgctttataatcctcattaattctatgtgactcatcttttttcaattcttctattagaacgctgctatattcttgtttttcaatgcttatgtaaattattgctgtttcaacttctgtgtttcgctctgagttcgaaaaagcgttttgaatgtattcaacttctgcatttatttcctctagcttacgtataagaaatttcctgtcatttgaatacggattttttaatgtttcggcatttagtaagcaaacaatttggccggatctttgttgcttttcaattaattcaatcgcctttaataaatgtttaacaccgctgctaaaaggtggattcataaaaatcaaatcatacttcttgtaagtgttaaacgtcagaaaatcgtctgctatcactctataacttttcccctcaaggatgtgccttaagttttcatcttgttcaattgaatcaatatcatatttcgaattccctctatagttcttggtgtatttgaattgattgtgaatagcttctaccaaatcccctttacctgctgacggctctaaaacagacttaatatgcttccattctatttttgatgtcatttttcggattaactgtggtggtgtcggataaaaatccggattatctttaaacattttttgttctccctttttagggaatgagatgttttctcatcccctcttattttatagactaggtttatatgtgttgattagaggtttgaagcttttattatttaagtaatttagaacctcgtcaaattgtcttttgtcacacgagtagtacttactgtgaattattttagtcccatctggtttaacctctacattattcaacacagtttcgggcagcgagtgccaccctttgaacatcaataattctgaatagaagtgtcggtaatataaatttcttttattttcaggcttgtatgtcaacttcactgcattatcatattgagcatatttagttgactggcaactgtcatacgttattttttcagtaattaaagatccaagatcagatatgtaaaacagagtatatttttcacctttttcaagatcagcatttttaaattgttcttgaatgctgtcaacttcatggagaattctgtataaagaaattttcaattcctctgtatctgcttgttggataatttttttactcaaatttaaattattcaatttcaatttttctttgagtaaagctttatatttgtcccagtcttcattattccaggttgcaaatatatttaattcttcaatgactgagctagaaagatcttctatttttcccgcttgatattttaactcgtctaattctccttcttttatcgcttgtttatcaaaaattgacttttcaatttttgcattgtccactaaaccaacgtatcttgcataagaatggccttgagcgtctacaataaattgcaatttcccgccgtagtacactcctacgccatataaattccatttaactgtgttcttttctaaatcgtccatattgtaataatcaatcattgagttgatcctgttgtcttccgtaaaacttccaccggtttccgcaagaaaatcaaaatcatttaaaagcaagttagaaaagttgtttaaagcttcttcagtattgaaatgcacttcttttgtaattttcacattttcaagtctgtagtcacctttagcaacctcgtctttatattgatcaagtgcttgatttttgtttaagttggcaaactgtgcatcaataacaaaatactcttgatcttcattcagttgttttactacaatgctgctatagatattttcggcttgtttcttttcttcttgccgtctcttatattcagcatttttgatttcttgttcttttaaatattcctgaaattctttttcttttctcgctttctcggcttcttcgaattcttccatctttgaatcaaacagtgtcatatcttctttaatttcttctgtttgctctgtcactgtgtattcccaatctaatgaaacacgaccatagaaattgtagcttccagcatagtcagtgtaaggatctgctgggctgtagcaatggcgataattgtttaaaagactgttgcaataatcataaatcgcagtcaaataagctgagcctttttcataaggacttgatttgattgtgatgttaatagtgctatgtgaatagctacccccagtagtaacagagaatttgcattgtgggagacgttgtcttaaatgctttcttatttcctttgccatttcttttacttcttgttccttatttacttctaattcactccattgtgttgcatcccacagactcatatttacaccattagctttctttttggtttttgtgattgttttagaagatgagacttcttgtttagtaacaccattagcgacctgcattgatttttctgtccgtttgctccaccaacattttttgaatccagagtatcgaaaaccgtttgatttaagatgagttaaaacctcttgttctggtttactatcaaaatatagttcaattccatttaactcttcattaattcttaaaacagctgtcattttcaacctctccattctttataactattttatttttatcttaaatgtatgtaatcctttgacttgatttaattttaacatgatcacttaaaataatcaatagatattttatttttattctaaataaagaaaatcctattatcgaggttcagcttgctgaaacgagacggccgtaaaggcactttacggacgaatttattattttttatttaattatttttctggttctccttaagacttaggctctaaaaccgttgatatgactggcttattttttaagtttaagaggtttgtcctctttatcaggtatcgagccagtttgtgagcagcttcctcattcttagagaaggtatgtacaaagttatttcttctccatccctaatagctgacctccatacccattgcactaactcagacaatgcaaatgcgtcctggtctattgtaatactgtacttttctttaaaataattatacagaacagtattcgtatatctgtttattgtatatgctaagtgtttcttatgcttaaactcgtttgtagcacgtgcattacatgagacaaacccctttgtatacccattgccctttattctgttcttatggtctgaataagtcgtccacatagcttcatcacttgacgacttaacaatattattaaagtaattgaatacattgttcttcacctttttgatggtgtaaggtgatttatttttataccaattagaagacagtgaaaactccagttgtcctattgtgtttagatttccttcatatatttttattttgtttcttaactcttttttaaagctcctttcataatcaggacggtgatcaatgaagctatactgtccatccatgtaagctgaactgtacttttgatacttaatgttgttcagatcgtagtaatatttttgtatttgagcatcaaacatatatgtaagtatgtaaacttccttgaataactggaatacatcggctggaaagttccaaatcaatatattgtctttgaaatacattagattgttatttaacgccatatctcgaatgtcatcgtatcgtgtttcatagtcttttttttcttcattccatttgacaaaaccgttttcaatataaatcagattggaatcaaacagtgttgttagatcatgtttctttacctgtaattgttccactacttccatgacttcatctaatatcagtgtgtaattgcctgcaagtataagttcctttgtctcgtcgtttgcgtttttaaaaaggttatgagttgccacaatgtttttattttgtgataagagttcgtgaaaggattcaaacttatattgtgttttatcacctttcttctttactttaggttcgaaaaattgtttggactttatgcttttctttatgcgctcaacttcatttaaataaggtgtgatgaatataaaggtttcttctttaccagcagaattcattttgttaatcgctgcagatgttttaccgctccccataaccgaatcaattattttaattttattcataataagtgtagacttccccctttaatattaaaaataaaggaacggataaatgttttaccgctccttctcatgtatgaaattcaattgttgattctttcttcaagatcatgaatacgtctttcaagaccagagaatttcttatcattgtatcggtggtcactttctacattcgcggaaagatactgtataccctcaaggattcgtttcctatcccgctcacctctaataagcatcggctagagttttaaaatggatatttaaaagagtagtgagttaaggtgttcagctacttctgcctcttcccccttaaatacaattttttctctatcaatgatttctaattctgacatgttcacacgtctaactttatatccctcaattgtctcttcctcttctatttcaaaaattctatcttctgtaatcatattcttatcctcctatatacattgtatttttcctcttaacttgtaactttattatatcatgatcactttaaatgatcaatatctttttgatctttttttgtaaatcaatatccagaaaaccacaaactttatttatttaacctcttacgtaaagtaaaataaatgatccatgacaaaatgacaatgatacacgttactatgaagatagccgtaatcagcgactgtattccgctgctgaaataatctttgatgaacagaaacaacaagaataaaacaacaaatgttatgttcgtaaaccataatgagaatcgtttcatgtttacaatgtgcttgtccatgttataatatgggtagtgactaaaggggattaattcccctttagcgtgttatctgcgtatacgtttgcgttgtctcttgctacggaggcgcttgcgtgtacgctttttgcttttcttattcttcatcaggttttgaatcttctcagctatcgttaaacagttgatgattaaaaccgtgataggaataaggaaagcaattgttatacccactttctcaagcactatgtacacctcctttcctataactctattatagcacatttccctttcaaagtcattttatttttactcttaaaatggatttttttaaattattttggcactattattcatggctatttataggctgtataaggcgtgtatgtggattggataccaatgatactatgattaaattaaaattgattctaggtggattagaatgcttctgatgatgtgtgcttagtgtgtataggatggatatatgatgtatggtgaaggaaacggatagagatgattaggtaagctgaggatagtttatggtggatgcaatgtaatgaggatgggaaaagatgaacattaaggatgaatataaaataggtgtgtagttagatgaggaattgtatagataacacttcgatttgtttcctttcgttatatacacgattattttaatgaatgggtattcacttttaagttgaccgcttaattattttttcaaaaatatatattgtttttcatttgaaattgtgttagctgtgcaaatttatcacctaaatcataaaaaccctacataacgtatcttatatagggaattaaataccaatatatagggggtatattaacatctaaaggccaaaaaataggaacaaatgtacccctagcacttccatttccacaccaaacttattttttcactttcccatttttcagcctattttcacatcgtaatcgctatcgtaaaagcctataatatcaatgtttttccaccccttattctcccctttttcatcagatttttaaataaacaaccacttttcctctctcctgtctacgttttacgatcacaaaacacctattatcccctttgacagccctaaaacattgctatatcaactaaataaccctttctgatcttcatttacgataagcacttttatagctaacgatcacccgggggtcattaaaaatcaaaataaaaaagccaccataataggcagcttccctttaaaattaacgttttagtctcttcagtgcctccatatacgaggtctttttcgattccttgttctccagcttcctcggcttgaataaatcctctctacggcgattcttcgctttatagacagttgtttctttaacttcagtgtttccactttcaattagatcatctaactgcttcatccgctcattgatccaggttaatccactaaggatggttattgccctattccctttatcataatgtcctttaaataagtctaggggcatcttgttatcaaagacattaaacagctcattatacgatatatgctccgttaaaaactcatgaacatccagaatgacaccagctctcatcacatttgtaaactcaacaggagtaaatatcgaattgttccacgacttctgtatatcttcatgcagcttatcaaaatacttaccctcaattgtaaattcattgaggtctgtttgagcaatagtcatgattcctggtgtgtcaaaaagctgatttaaatccttcctgtctaatgtactgatctttgatcctctgtccgtgtaattgagtaagacttcgattaaatcaaggaacatcttgtttgtctccttgtatagtctgctttcagaaatcttcccttcatatttgctcaaaaccatttgattatccaaaggtaagacacaggtctctggcatagataagtcatcaagtaactccagtgtattcatctggttaaccaatacctcattattgtcaggaaggattggtacagcaactattgttttatgtgtaagacattcgtttaacaattctaataatataggggctactcctgaaccggttccaccagctgcagagaaaactacgaaaataacttgtactgaaggcttttccattgtgttctttatgaactcaatagaggactcccagttatttttcatatgtttcgctgctacgcttctgtctttacctactccttctgtccctaccagatgaagcttatcttgaatattgattaatgaattaaggtctgaaagtgaataatttattgcaacagaatgaaatcctctcttcattgcttcatccgctatacttccaccggcctgaccaactccaataaatccaaacattaaaccctctccctttttaattgatatctcaaagcttcttgaccatattgagtaataaaaattgtatgctctttactgtttttcactataataataaactgcaaggcctcaagacgatcaatgctctttctaaaagtagcatcagttagttgagttttagcttgaatggttttcttcctaattgatttaaactttaaatcagccccttcatcgctcaataagcctagaatatacagatcatttcgagttaagttgtcaatgacagaagcaaaataagtatccatgtgacccctccttaatatctgatgattctgaagtatcttggttgatatacgattattatattgtctatttgcatttaaatgcaaatatttttgtatcttaatgcaaataatcatactctgcttgtatgtaaaccagtcattttataaaatttattcaaacagcaaaaggatgatttaaatggaatatagggttaaaagtaagttggattcatttctaaacagcaaaggtattgaaaaaggctggttagcagagcaaataaaagctgaaagagcaagtatatctagatggtgtaaaaatgacagcgagggatttgcaaccgtcctccctagtacatacaatcttttattgatggcacatattctaaattgtaaagttgacgatctttttgaattaatcgaaattaaatccaattaactttggatttttatgtttacaagagtaaaaataaaatatataataaagacacaaccacatgaagtggtctttattttaatcattttaagagtaaaaataaaatagtatggaggtgtaagatgaaaaagcagtatttatttagtcatttaatggggtttattgagggaaaagtagtcgatggtacagcaacacccgaagaagaatacctttatcaggattacaaatggtacggaaagattaataagcaaagctttacatatcgaagtttagtaaatcaatatcttaatagcgaatattaagcacatttaaagtaaaaataaaatagtaaggagaggattgattgaaaagaaaaaaagacggattgtctaagcaagttcacatatacagcgtggacacatcagcattttataatgacaaagaaaattcattacataataagattttgaagtcttatagatacagagattatcttaagacattagacaatgtaaataataaacataagaaatacatttcacaaagaattacataccttaaagaatgcctctattctgcattcgaagaacataatgacataagaacacttcgaactgacagcttaagggacaataaagtgatttctttatttgattcagtgttgacccgaacattagggattaaagaaaacaccctttcagaggaaatcatggttgtccagacttaccattttgaagtattgaaggacattattgatcagggatttttacataacaatgaaaaatacgtttatttcacgagcagtgccggtcaaattcgtacaaagaagtcatgtttcattaaaaaaagcacctacgataagtatcaggatgctttgacatgcggcttgagtattgaaaagattaactcccttggtggtagcagcattaacaaatggaatagctatatggccttatctaacagtgccagtagcccttgggagattgatattgataaagccattgttgtcgacgacttagaaactgatgtgtcgagtctcgttgactatattgatcgagatacctacgagatcacacgaaaaacaatgaacattcccattgagcatacggatggctgcggaatgattctccccactctgagtagcaaaagcttcatggtcagactcccatgggtaaagggtttattagtcccgtttgattttcgcaaatttgctgaggaaaacaaagcttttaaagtaactgatatatacggcaaggaatgggacgtagtgaaagatgatgttcaaattatcttcactaaaagccagtttaaaatgtggaagtattattcatcgtgggaagaatatcaaggcaattataaaaaatatggatgcttaggggcaaaactcaacgaagaagatccttctgttgaagggaagctcacttatcaaatgctccaaacacttacagatatctccggtgaagaattaattcaaatgagctcaaagactgtaaaagagattaccacattgggaactgacaaagaaaccatgttaagagttcttggagctacggagaaaaagaaacatcggacagctcttcaggacgctttacttctatatccagaacttcttaacgatgatcacacgaaagaaattattaaaaataaaaagaaaagcatgattaaagatgccaaatcaggaaaattgcttgttgatggtgctcgttatacatacttatgccctgatctatatgctttctgcgaaaaattatttctgaatatccagaatccaaaaggactgctttcaggaaatgatgtccattgttctttatatgatgaagggtatattgacatcctccgctcccctcacctattcagagagcatggtgttaggtggaacaaaaaagatgagaaatatgaaaagtggttcattaccccaggtgtttacacaagcattcatgatccgatatctaagttgctgcagtttgataatgacggggataaggccttaattatttctgatgagttaatcgtcaatattgccaagcgtaatatggaaaacatcgttccgttgtattatgaaatgtctgtagcccagaaacaaaagattaatagcaggaacatctatgaagcactaactcttgcttatgggatcaatatcggggagtacagcaacaacatcactaagatatggaacagcgacaatataaatctggatgtgatcaaatggttatgcatggaaaataactttactattgattttgcaaaaaccttattcatgccgacccgtcctgatcatgttgatgaaaaaattaaagattacataaaaaataaagtgcctcacttctttatcaatgcaaaggataaagaagaacatagtgttgagttaattaatgaaagcacagtaaataagttagactccattatcccttctgaccgaattaatttcgcagcagtggcaggaaaatttgattaccgcttcctgctcaagaacagggatattaaattggacgatgcaattattcgtgaatataaacgattagaccagaacaagaaatggctcatgaatgatgaagacattaagcctgggcaaaaactttatgtttataaggtcattaaagacagattgctgaaaatctataatgacgagcaatctgttgctgatgttttggttaagcatttatataaaaagaaaagcaaatttaaatcaacattatgggagtgctttggcgatctaatattggaaaacatgcagaataatttaaaaagatttaaatcttgttatagttgtggaaagatgtttaagtcaatctcaaataaatcaaaatattgtaataaatgtgcattggaaattgaaaaaaagaaccatcgattaaggcaaaaaaaatacagtaagaaaaaaatgacgaaatagaaagtgtattgagccttactcccccaaggggtacagcgattttaccggaaaaagtttaacgaaaaaatccccttgaacccttgatataactggtctgaaagccctttttgagataatcgccataagggagaaagaaagctaatttccacatataagggtgagtacgtctcccattttttcaaaagaagcacaaacgataccgtaattatactttaacacaaaaataaacaaaatcactaggaggaattaaaacatgaacaaaacagaatttgttggagaagttgcagaaaaattaggagttactaagaaagaagctgcacctaaagtggaagcagtatttaatgtcatcattgaagcactaacaaaaggtgaatcaatcaagattccaggagttggaacgtttgaagttcgtgaacgtgcagctcgtaaagggagaaatccgcaatcgggtgaggaaattgatattccagctacaaaggcacctgccttcaaggctgctaaagctctaaaagacgcagtgaaagcttaataaaatttactgaggacgacaggaaaggcttcctgcacgcctttgtcacatagagcttatgctcctaaaagtggcagagttagaagttatggaggaaattgtcgacctcccctcttttttcatgtattcatctccaggtttattaattagagttcttttattgatggcatgggggtgtcgtcaataataagctgtttactgatatgtgggatatcagttctccgctaatattcatttgtttgaggtcttggatgccagggttttggataagtggatattagcggggtattgccccatcgtggattaagctttttctaaacattgctattctcactttcatacgaacaaaagcattaaattcgactttacagctacaactggtcattgtagttagtcggataatggtcacttatgagggttcgaggttaactcgcatgtctgtatctaaaaagagacaggtaaatggctattatcgggctaaaaatgtcggtaagacttaacgcattattgcaaattgcgactgaatcccatcagggtcttattatgggtggcatatagcctgaatattaattgcggtgtattgcttcggcttgcacttaggtaaggtagatgcgtctcccttccctttaaataatgcccttgtaagctttgatgcttattatgcggtcacataaaaatttttccgggttagcgaggctttttgtaattacatcccctcgcaaaataagtgagatggtttttgggcgattgatcaccgctcccatttcacagaaaaggattattttcggtcttgccttttcaatttcacttagcaacacgttcactttatttcacttcatctccttcaatgttctgtatggagacttacctttcccatgcacatacctccttacacgggtcagagaaaactgtgcaaaataaatggcgagcgtttgagacgctttgtttctcaataaggcgtgtaacccgacaagagcatttaaaatgccattgagaaggcttattagggtcttccttctcaaattatttttcccttggctctcagactctactgagcagttggcaagcaacataaaaacttgatatataagatgtaaaggtaataggaattttaacacgtcccttaaagcgtgtatttttgttatcatagctcatctgccaggtgtagaaggagccagctggatttcgcacagcgataaccagccttttatgctcatgtaccatgatgtacaaggagtttctgaagacgttatttggcgtcttttgttattttcgacttacaaagatttcgaacgatgaacccgtaatcagcgtattccctgtcgattttgcgtacctacgtgagttaatgaatattatgtaaaaaaacgctaatttcgtatatttttcaagggaggacgaaaatgccgatacgtattaaattcgacaaagacgcttacttaaaacgtcatagagaattccgggaaaaattagacgagtttaagagcggcgattatgaggaagcgtataatcaagcgcaggtaatcttagaatcgagtgtcttaaaacctaacgatgcggtggcggaataggtagacgcttagacgaacataaggacgatgctgtgaggtagacaacgggctacttaatagtcggtttggctaacggttgttgaaattcgtccatgcgaggtgcaaatcctcgtccgcataataaacgaatagccaaggcggcgtgtcaagctatcgcagcttgctaaaagccaacagcgccaactatacatccggcattgtccggcagagaagcgagcgagtaagggatgcgtcctgatctcggtgtatagacgcaatcagaacgaggcttccgcaccctacggcggaggtctttttgtgcttgcgttttactttactgatcagccggaatgtccttacgagacttctggtacgcaagttttcaataatctccttcgggcgtttccccaacgcctatccgactcatattttcatctccttatatccccttttcggacgttaccgatgtttcggatcatcgggcttccgaaggagcttattgtacgtaaataaaacaaatattggaggaatttaatttggctaagaaagttcatacagtaaatttaaaaggtaactatacttacattgatgggattattgaagaagaaacaaaaacagacatcgagcgttatgatctgaattctattttaaaatcatttgacggtcggaaagtgaaaatttctattaccgaagaagacgaacttccacaaatcaatgagtaggtggtgactgaatgacagctattttagatactgttttacaacgagaaaaagacgaatcatttactgattatcatatcagacttttcaaaaacaaagacacttatcacattgacacaaaaacaattgctgcccttttaaacaaggatcagggaaccaactatgatgaaagcaaatggcgtaaagactttaaacaatttgagcgctggcacgattactttatctcaaagaatatgaacaaagaagttcaacaaaaacatgaagaaattcgcattgaatccgaaaaacaaacaatcaaagcacgagatcaaaaaagagaatatcggaaattcattgccaatcaagcacggtttgaacaaattaaagatgatgtcgtacaagctattgcatctttagagtcaaaaagaccccttcgcttcaccttcccatcacctgctattgctgaaaaacatggactcgctctattcagtgattggcacttcggaatggaaatcgacaaccgcataaataaattcaataaagaaatctttaatgaacgtgtagaacatctcaccaacaaagtgattgagtatggtaagcagaatcatgtttccacactgcatgtagcaaatctcggtgatttaatcggaggtcttattcatgtgtctacaagagttcaggccaatgaagatgctgtagaacaaattaaatatgtatcagaaacgcttgccgaggttttagcgatgttggcaagtgagtttcaagaggttaagttctacaacgtggcaggtaatcacggtcgcctctccccttctaaaaatgatgtagggattaaagaaaactttgaatacctcattaattggtatcttgaagccagattaaagaacatagagaacatctccattgaacctgagcaagacggattcatccccgctaaaatcaacaatcaggaagtcgtgtttgtgcacggacactacgatcgtgttgatcagtgtgtaacacgattacctcaattacttggctacatcccttcttacatattcggtggtcatattcatcacaattatgaaaaagagtacggcagcacaaccgttgtagtaaacggagcgcttgttggtgcggatgattatgctatgcaaggtcggtttggcacaaaaccttctcaaaaatttatggtttttgatgatgcaggtattgaggctacatacataattcgctttaaaaatgaaaagtaaaaggaatgatcctatgtctgcaaacgattttatagaaatattagcagtgcagtgggacaacctgtcccctgaaagtaagagcactctagtaaatttgattgttaattaatataaaactttaattttataaagatgaggatgaggaagattgaaagaagaaactaaaattctttgggaatatgtaaagctgctaaaagaaattaatgatagtggttatctgtgtaacagggaattaaaagacgccctgacaagtctgcataaaagcctgggatttgagaaaaacactaaaagtgaacaattgaaccgagacgtcaaattctctactaaacccttaaacggaactagctacacattgagcacgggctacaatcctgaaagaattgctgtaattaatcctagaagagaagaaacaacctttttaattattgatttaaataattcccgtattgaggacatctctaagaaagtggagcatggaacgtttaaacatcaggctagtcaaataaaagccattattatagacaaacgaccgagtaagttaataattgatgcaaacggtattggaaaaggtttgctggatgctcttgctgataccttaaaaggaaccaaggttgttttgtccgaaaacggtgccttaacttataaataaaatacttttttagaacgtccagtgatgatttgagaaatctcgactccctctctattgctgggcgttttataaaacgtgtttttgaaccaaaattttggaggtgaaccaatgccaagaaaagctaaagaaaaggaaaaattgatctgtgctgcttgtcaaaaagaaaaggacaaagagtcggggttctataattcacgaagtagtctgtatgagaaaacaggaaaagtccctatttgcaagacttgcttgaagaaaaacattgattacagcaatattgagtcaatatatacagtcttacagcagatcgatgttaaatttgatccgttgtattgggaacaagctgaaaagagaaaaacagatacatttagtgcttatatgacaatggctaattcattgaagcagtttaacggtactggttataaagacagtgtttttgaaagacaaccagagaagccacttatagaggaatctacgcctacaaacaattctggtgttagccaatctgaaattccagatgacctgattgataaatggggtattggttacacccccgatgagtaccgtcagtttgaaagaaaatacaataaacttattcgaaattacggagaaaaaaccacacttcatactgaaggcttgctttcatatattcgtttccgtgtaaaagaggaattagcaactgctaaaggtgatgtaaaagaagctaaagaatggggttcattagcttcaaaggcagctacagatgcaaaaattaatgtatctcagttaagtaagagcgatatcagtggtggagtcgatgtactttctcaattatttgaagccgttgaaacagaattgggcattatcccccttcttcctcgtttagcagcccaaccatatgatgacgctgatctaatcatttgggcgattataaattattacagaaggctcgaagataaggaaaaagtcgattacaaagacatttaccatttttatgatgaaatgcttgaagaagacttcaaatcaaaaggattgtcgcctgaagaaattgataaactaaagagtgctcgcaacaatgttttcagagacttggagaatgtgtacaaagaacctctttatgacacaggtgatgaagattaatggctagttataaaaacttcacctcgaaaaacaagaagcacacaaaaaacagaacagatatttacgacgcagcttttgaaacccctctgaatccagatgacaattcaaacttcattggcaagaatatctccaaatgggctgagttcacctcatttattcgtttttatccagacattttttacgatatgttgaaacccgaagtcggcggaattgagctggatttataccaaagagttatgatgagaacactcagtcgcttccctcagaactacttctgtattccacgtggcggatcaaaatgtgttgcaggagacacagttttatttactgaaaatggattagtagaaattggcgaactattcaattacgaaaaaaaagagtctgaagttgaaacaatacataaaatctcaatgaaaaacagatatggtctaatggaaacttctatggccggcatatcaagcggattcaagaaaacgaagaaaatcaaaactcaagatggctatgacttggaagcaagtttaaatcacccagtattagtaatgtgtgaagatggaaaactaagatacaaaaattctagtgaaattaaagttggagatttattacctatttcaagaaacaataatgtatttggaagtgaaacaaagctaaatgtaagctttgatgatttcttaaatggatttagcaatcaaggcagatggcaagtagaaagaaacaaattcaatattccagaatacattgatgaacaattagcattaattattggttatcttcttggtgatggttgcttgactagaaacaattcaatactttttacaaatgaagacgaagatatattaaataattatatagattattttaacaacgtattaggtattgcagttaagcaaaaagatagaattaattttatcgtatttggtaagctcattcgagaattcttcagacagttaggactggaagaaaaagatgcttttggtaaggaaatacctaaaattatacttaaagcacctaaaaatattgttgcaaaaacaatacaaggtctatttgataccgatggatgtgtgacaaataaaagcgtacaattttgcactgcatcagaaaaaatgagtaaacaagttcaaatgttacttttaaactttggtattatttctttcagaaaaaaatatctaaataaaaaatttaatacttatcattataagatcaatatttctacaaagaatattgatctttttttacgggaaattggatttagttgttcaagaaagcaagaaaaacttatatcaatatgtaacaaaaatcgcaatccaaataaagatgtcatcccttatcagcaagataacattatagcaatttatcctaaaggtaaaacaagagataaattttatcatgttcttaaaggatctaatgatcttacttacgaaaaattatcactattattaagtgaaaatgagcgttttgataataaagatagcgatgaattcaaccatttagtagagctttatgattctaattactattacactaaagtaattgaaacagaagactctgagaactacgtttatgatctatatatgcctttaaccaactcatttgtaagtaatggattagttagtcataatacattgacccagatcatggttgcataccatacagctatttgctttcctaatgtaacgttagccattaccgcttctacaaaggaatcagcggtgaaaatttggaaagaaaagcacgaggaaattttaaggttttacccttccattaaagatgaaatcaagagtgaaaacttttcaaaagacagtggtcgagttgaatttcaaaacggggcgatcatcgataacctggcaaacgcccaatcatctaagggtttacgtagaagacgtggctccttagaggaatctgccttgattgataaagatttatacgatgatgctatcgagccgatttttaacatccctcgtacaaccatgactggcgaaatagatcctgctgaattaaatgggcagattaaccggttctccacatcaggatataaaaactcagatgagtacgaaaaaatccttacgatggttaaggaaactggtgatcttaaaggatcctttgtattcggatcagattggcgcattcctattcactttggtcgtcaaaaaatgtctgttattaataaagcgcgacaagggaatgtaactcgcttccgtcagaattacctttgtgactggattggtgcaagtgacggcgcattgattaatatcagtaaattgatcaaagctcggacaattacccaccctgaactttcttgtcctagagataaaaataagaacttcttgctacatgaatatgtaatcggggtagacgtagcccgctctgcggctgaatcaaacaataaaacagctatcgttgttttgaagataatcagaaacagcaataacctcattaggcaagttcaagtggtcaatattatagagccaccaaacggattgagttttaaagaacaatcaatcatggtaaaaagagttttcaaaaactatggaggaaatcaagatacttctctctcaagagttaaagctgttattgtcgatggaaacggagtcggtggcggtttaatcgaccggttattagaggatgttacggatccggagaccaatgaagaacttggatgctgggccacaataaacactgatcaaaagccagatgtcccaaattcgccggaaatcgtttacaacctaaaatcccaaggtattaaccaagacattattactcaattcctggattatgttgagtccggaaaattgaagttgcttaaatcctatgatgacatcaagaaccaaaaaagcatatctgatgatgtaatgattgaagcagcatgtattcaaactcaattgtttattgacgaagtagcaaacctcagaattaaaaagacacagaattctttcactgttgagcaagttgtaaaaagaattgataaggataggtacagtgcaattgcttatgcgctgtattacatagctttatttttagaaaaggaagaatccgatgatgagtattcatttggattcttttttaattagaaattgaggaggtgaataatgactacatctgaaccacagtcatcatatgagtttaatacaaatttagcgccgcttgattcattgttctttaatgatttatttaacggtatttcttacgacaaagttaaatcatggctgaaagaccacaacgtctacaataaacagattagggatgcctctaaattgctttataacgcaaatggtgtgtatagaaacgttattgactacatggtagccctccctactttagacagagttattttgggatcaagtaaagtagctaatttcaaatcgaacaaacaaaagttcaatctggctttaagaaaaatcggcgacaaaagtgctgtcagggatgcattaggaaaactcagcaaatatggcactggcttttattattttgattctgtagtggatgattctttccccaccactctaagtgacaatgagatcggatcaataactgaatcaaatgctattgacgactttaattgttccgtcctccctcttcctctcgattattgcaaaattatcggaaggaaaaattcctcttatcagttagcttttgatgtctcctattttgataagttcacaagtaacgggagatcgctcaagcttagacgatggccagaagaaatcagacaaggctataggggttataagaaagaccaaaatcgaaaatggttagttcttgataacaataagactattgctgttaaaggaagtagcgacattgaagatcaatggggacgcccaatcggtttatccgcatttattgatatggtttatgatgaatactttgttgacactaaacgaaacattttagatgagctcaacagcactttaatttatcagactttccctgaaggtgatcaaaaaggcaaatcagccttatctcaaaagcaacaggagcagcagcatgagaatataaaaaaagcgttagttgctaaaggaagcgttaaaggtgttaagttcttctctttggcctctggaacaaaattagacaagttggaaactaatgtagatttcttgaaggttaaaggtgaagacgagctcattaaacgaatcactacaaatttaggatttgcaggatctgctctcaatggtcaagacggtaactattcttctcaacaaaccaatatcgagatggtttcttcccaaatattctcctggttagaacaaattcaaagtgagtttaacaaggtgataaacgccaatatcatcaaagatcctcgctcttatattgaggtttactacctccctcttacccacgttaacaggaaagaaaaagtccaaaacatgaaagacctttatacaagtggtcgaggaagccttattgcttggatagccgctactggatggaatcctgatgcttacttatccctaatggaatatgaaaaagacgaaggttttgatgaaaagttccctgttcatgcgacctctttcacaatgagtaagaataacgataagtcagccggcgcacctgagatcgatgatccgaaaaatgaaaacacgattaaatcgaagacaaataacagtaacggaacgccttctggctcttgagaggaggtgattagtatttgaaaagcacgattttagaaattaacaatcagaaaaaaaccagtggtcaaacatacatcaagtgggtcgttctcgaaatccatgaaaacaatactcagttcaacaagaacggtattacctggctggagaaatacataaacgctaaccttgaatcaatcaagttaatgccaatttgcgcagaattcttggatgatgaaaacagtgagccattcggacacggtttaacagaagtcaaggacggcacccctctctttgaaaacagcgcagtggttggtacgactaccaatgcttacattgacactattgatgttaatggtgagccaaaaagagtgttaatagctgaaggcttcctatacaaccagcgctatcctaaatttgttcaatggttaaaatcaaaaatgtttgatggcgatttccctgagacctcggttgagatagcagctgtagaagattcagatgcaattgaatatgaaggtggctggaaagagcaaggacgtatacctatgaaatttgactttacaggtgatgccattttaggtattgaccctgcagacgacgctgccattttgcttgaattaaacagtaaaaaaaaggaggataatttaatgccaaaatctcaagaagaagtagtccttgagttaaacaacaaacttgataataagaataaagaaattggagaattaaatcaaaaagttgagaaacttactgaggacttaaagcaaaaaactgaagaactgaatgccgctgttaaagctgcaaaggatgaaaaagctaaggctgatgcaaaagaaaaagaagcgcaaaaagctaaggatgaaaaagccaaggcagatgaagagcttaattccctaaaggaattcaaaaacaaggcggtagccgaaaagatgcaaggagagcttaaccaagctttaaaggaatattctcctgaagaaaaggatgtcgcaaaagagaaaattgaaatgttctctaagtctccttctgtcgagcttaaaaacgaaattatttctgaaatcaactcagcaatcgctcgatccttcatcactgaacgctcaaagaagcaagcctctgagactaatagcacaaatttcgatatttattcagaagttcgtgattctgggcaacaaagttcagtgactattgatgatctttattaagataaaataacacttttataaaatttaggaggaatactcaatgttcaaattcggaacaattggtgcttataaacaagtacgaaataatccacgttgcaaggctagtgtcgatttagtccctggtctagtcgtaatccctaacgattcttctggtaacgcattccctccaggtgcatcttcaactgcaaaaggtgatgtgtatgttgttggaaacattattgataaacctgaaattcgcaataaagaagacttcaaagttctaaaaggtgaatatgtccttgcttttaatttagctgacttaaaaggactgccaattgaacttagctcagacgtagtagttgattatgatgcgcttgttaaagatgacgtattggttcctgctgcagacaaatcaggtaaatgggttaaagctggagatgacgttgcagagtttaaagtatctctaaaagtcttagagaaaaatacatttggcggaaaaggtttgtacctaacagtacaggcttaattatattctggaggtaattattaatgtttacagttgaattaaacaatgttcaaaaagactcaaaccattatgcaaatgctaaattgaatgctaagtcccctattgtagaaatcttttctgcagctgcaacaggtcaagatctttccaagtttggagcaaaagccaatgctgctatgacccatgtgaaggaactagcttccaaagctcttatgggcaaccctgtagctaaagccgagatcaacacaattgtgcgttatgccattgagcctaagcttatttcagcaattaagctatttgattttatgggcacatttagaactatcggctatgatcagcaaccaatgatgacatcatacgcgcatgaatccatccgaagccaattccaagcttcccgtggtgacgtaccgttcgctactacaacttggagcgaatacccgattggaactcaaaccatttcttctggctatgctgttaactatcgtgagattcaaagtggaaacctcgataaagtagcagaaggcatggagcaagttcaaacagatatgatgaacaaagcgatgtactatgtagtaaatgaaatgttcaatgcaattaaaaatgcaacaggtgttaaatactttgctgaaactgaaggtatcaccaaatcatctgtagacgatattatcacaaagattcgccgatttggacaaccttctattgttggtgacttttctgttgtttctcagttaaatgactttgcagggttccaggctgtaaccggagatgcttcaagcactaaactccctcagtctgttatggatgaaatccgaagaacaggattacttaacacttataaaggttcttctgttgtagaattacctaatgcttataatctaactgaattaaataaagccggcgataacttcaaaacatatcttcctgaaggacttctcttcttcattcctcaaggtaaaaagtctcctcttcaagttttccaaaaaggcggactcacatcgatgaatggtaacgacattatcactggaactgagatcactcgttttgatatggaaattggagctggtgtagccaaaggacaagaacatcaaattggtctcatcagagacacaaaatatgaattaccacaaatttaaacaatttaaaatttaggagggctgtgtccctccttttatttttggagggattacatgtcttttaatttagataaaaagattacaattaaaaatttatgtccatgggatttatatttccgaaagattgactctcacggtgacttcagattgccggccaatggaattagacagatcacagctggggaagtgcaatcccaagtctatgacaatacctcactatttactggaactgacggtcaaggtactcatgccaaaatctatattgatgacaaagaaacccgtgtgcacttaggttttgagaccgaagataaagacgacaaacaagaaattgttactgtagaacgaattaaacaaatcttgggatacaaaacccaaaaagccttcgaagaaaatgttcaaaaggaaatcttacttgagtctgaaaaagctcagctgtttgatgtagctaaaaaagaaaagattaatgattacgctaagatcaagttcattgaagaatacactgggtttaaatttgatactcaatcataagggaggttaaatcttgactccttatgaaaaaataattaacgttttccactcaatgtttcaatcaaatgaaattctccctgatggccttgaacagcagtttttcattaacgcagttggtgaatacgaaaccgaactgacagaacttggttatgatgaaaagtccaatacatttaaatatccccttacttcatcacaaattcaagttttaggaatgcttatgtacaaaggattctctttcagatatcgagacagagccttaaaattaaacaacgttgtaggaagagatgttcaattgacaggtttatctaatactaaagctcaggttaatagatcctatgaagatcttgtcgatgagattgaaaaaaaaatgagcaaactgaaagtgaataactttgattgaggtgattagatgtctatagattggtatctaacctcttcttcaaattatttgagtggctgggaaaacgaagagtttaattcaaacaagtatgaaattttcaaagaaatcttagcaaattcacctgaaacttacgacattgaattgaatggtaagccagaacaggtgataattcaaaccactcaggacagcgaaacaaaaaaagtccttacagttttaggcttattaaatcgtggagacttgattttgtatgacggtagttactggttagttaatgcgcgccccactgataacaaaatgaatgacagtgctactatgcggctttgcaattcatcaatcagtctaacatcttctgacaaacttattgattctggaaagattgatgaagttacagggagaccgataaagattaaagtgcctggtgagaaggttgacatcccgtgtgtattagaacgaacaacctcaacaattggatcagaattggctataaacattcctgaagggcaagcacatgtcaccatcccttttttaaaacatgaaaaattaaagaagggtctttttctttctttttatggtgaggaattccgtgttgatgatatagactattccaaggtctatggagacaccggaacaattagacttatagccaaaaagaaagttggaggtgatagcgattgagtatgatggttgaacatatgacaactgtatttagaactattatgaatgatacagaattgaatcgtcttttatattataaagatgaccctctctcctcttctctccctgatgttcagacgttggaaaattattatgatccagttgatgattccccatcaatattaagctcaataattaaacgtgctcccaaaactgatgatttaaccgatcaaccaatatgcagactttgtgtttatctcggcaatggaatccctaaaccctcaacccaaagtgtgatgctgctagatcaagacttgatgattgatgtttatacacacattaacacttatgaggagaccgaattcaggaacctgaaaattactgatcgtatttgtgacatgctcttcaatcaaaattttgctggcatcggtaaaaatgttaaatatacaaggttgctcatatcaaatgcgcctgaagggtacttgggatacaaattgatattcactttcggagcaagtaaatgaatgtgttaaaggattttttctttttaggaaggcctattaatactgaagtcggtgcaataaactttatccacttaagagattacccagagtacataagcgagctaaatatgatgaaaatgagcaagaaggaaatcatcagaaacttttcaaaaatcaacaatgacggttcattaaatgatttaattatcgaattgaagaagaatagtctcttcaaaattgttcatgattacttacccgaatttaaccaggcttattttaaagtgtttagcaaagtatttgtggacaaggaatcactacatcttattgatcagagagcatttaacaatgttagaaaattgatattagagatgcattgcctgactgaagagaaaattgttgagaatgatgaattacaggagtttcatgatttgaataatcaattaaaactccaaaattctcaaaatgatttaaaggacatcgctagctgtgtggctgcatttaatggatacacatatcaagaggtagccgatatgacaatttatcaattgtacctgtcatattacagaatgggtgaaataatgaattataacacttctgcgttatttgccactgtatcaactgatgtgaaaatcggtgactggaatagtcatgttgatatgtatagagaagaaaaacaccacctcagtacagcagatgctaaaaatttagagcaattattcggagactgattcacagtctctttttcattttaaattaggaggaaaacacttggcaaaacaaacagttatccatgaagttggcaaggtgctaaccaaaagacttagtgaccacaaggttgttgcatcttctgtaacacaaatgactcagttctcccaacaagtccaacaagactttttaaaaggcggatggggaaatagagacctgtatgtcatcaactcaagcaaagaggtttcaggcaacgtaaaaaatgctttctttgatcttgattttatggcaatgcagcaaggtgtaaaaattgaaaacgagacgatttctgtatgggaagatgaaagtcttactgtaagtgataccggcacaatcaaaatcgcgtatactcctttatccaaagtctcacttacaaatgaagacggagatcaacaagaatttaatgtttcagacaaaacaattactgttcctgaaacgtttgctgctaaagggaacgctgtaacagctcactatcaaattgaagttgatgcagaaacagttgaaattagtggtgaaaaattctccgagaactattacttcgaaatccacacacttgagtacgatccaaagacatcaaaaatttacagtgacctttatatccagttacctaaagttaatttctctggtgaagcagacatgtccttagaggctggacaagcctacacacctgaaattggataccgagcattagctgatgataatggcaagatcggtacttttgcccgtgttaagcgtaaccctgatgggacaaaaggaattaaaactgaacaagaagatgcgacatcgaatagcagtgtagacattggaacaacgcaagaaacaaaataacgttaggagcttgatatcttggcacttttaaacaaagacggagacatttacacttcagctagagacgatggaactggtaaaccaatcaccgatattcatctaaaatcacaagaaaaaccactacaagttgactttcctcaagctggtttggatgctatcaaaggcatccaagtacaatccccttccgtgaccttgaatgaaagagatcctggtttctcctcttttaaaacggataaattcactgttacttcaacagctcaaaaagttaccgcaggtatcactgacagaacagcacttactatttacccacctgcagaaggcacgatttacattgggaactcaactgtaactgctgatacaggtatcccattaacagccggtgacaaacctttttcagttcctgtcgccgctggtaaaacactttatgtctatgtgatcaatgacggtactgacagagacgtaagagtatttgaagctaaataatttgaggggattcttcccctctcctttttaaataaaagtcagtttttaaacagatttaggaggtggagttgttgacagaaaccgatgaaaatattttaaaaaccattccagataaagcaacctttacattccacgaagcaacaactgccccgtctgaaggtgaagaatttgtagtatcacattatcgggatattactgttaagatctctggttcctcaacttcaagagaaataaaattctttgctgtagatgaaaatggcgaaaagacagaaattgctggaacaaacaaaactgattttcaattaggtacgggtacattgaatacaaatgaaaactgggatttcgatattgcggggcttttcaaattcatggttgaggtcatttccgtaaatggagatgttacggttaaaggaattgcggtgagttaatgagcagcagtaaatttgtaggtcagctcaaacaaaacaatatacaaatcaataaccttaaagatcaatttttcagaactgaatctcacatgtctgatcatgaaaaacgtttatccgataaggtcgatgagttcatggaaaagcaaaattcagaattaaagtcgcatactcagaacatagaaaacccgcaccatgtaactaaagagcaagtcggattaccaaatgtacttaatgaagagcaagccacaaaggtggcttttgatggacatcttgacgacaagaaaaatccccattcagttactaaaagccaagttggcttatctaaggttgataatgtacagcaagcagcgaaaattgattttgacgctcatgatgcagacctggatcgacatatcacaaaggacgagcgcagttattggaacagctccgatgaaaggtcaaagtcttttttagctgaacatactaacgatcaatcaaacccacacaaggttactgctgaacaggttgggcttgggaatgtagacaatgtaaaacaagctactaaaagtgactttgataatcatctgaatgacactaatgttcatatcagcaagtctgatcgagaaaaatgggacgctgctcaacttttcaaactcactgacgatgatgggaaagtattctacaaaggtagctccgaaaaaacggagtacaatgatttgattaacactgggttttatttaatcgcaaatcaggggcttcactcccctgccaacttatccaatgtctatttagctgtcatgaactatggaactacgattgcacaattcgcattagaagcatattacggaacacatacttatttccgttttagaaagagcgattcaacatggacttcctggcaaacacatgagacgactgacggagcacaagcaagagctactaccgcactcagctcggcgaaagcttacaccgatgcccacgaagcaaaaactgatattcacgttactttagatgacaaagccagatggagtggcacgtcaggttcttggaacccagttacacttatcaatggagctacacaatactccacttaccctttcaaattctcaagtgtaaacaatgtgttatggctaagaggatctttcggaacattgccggccattggaactgcagttgctaaattctcaaccaagccaacacagctagtggattttgtagtacccacaattggatcatatggaacagcgagatttgccttcacaacagatggagatttacgttttgatggattgtatgctaatgacattaacagtgtttccagagtttcatttaatataggaattcctttatggtagtaggtgaaaatattatgcatgttctttattatgatgagaactttatgtacgctggagaagacttcattgaaggcgatgctcttcctccaaatagtacaactgctgtcccagaccccacaataatcttgcccaaatatgatcccaagaaaaataaatggattgaatcagcaactgaagaatacaaggatagcgttaaaccaagtatccctgaacctaacgattttgaaataataggacagaccctatcccaactccgcctaagcttgcttcaagtcaacaaaacaataaacacaatgttaaaagatattgctgatctaaagggaggttcataaaataactacatacaattattgggttaatgccctgagtcgaaaatgggcaaccgtcgatcaagtcaaagaagcttaccaggaattcaacgatgtgacaaaagaagagctccaattaggagtaaagaatggtttagtcactttagaagagtacaaagaaatcaccggcgaagactacgaagaagcagacacagaataaaatacaagttttatttagacacctctcccctattgaggtgtcttttttaatgtgtgcagaggatatataaggaggaaatgagatggcatcgaaaaaattaaatcttgggttgattgaagaaagtgtaagtaaatatgacaagaaagaacgagtacaacttactgaggacgttcatgtttttatttacccttacttctcccctacccgcttaaccaaaatgcttactgaattaattactgacccacaaaatgctcaagaaaaaaacattgactttaaaagcataaatcctgttcaatggggattcttttcactaattaaagaatttacagacttgggtattccaagtgatatcaaaaacaaagttaagtggtttgttaagcttgtggactctgaatttttcccattgattattagtagcttccctgaagaaagcatgaagaaatttggagaagcaacaaagatgatgcaagagaatttagacaaactttcaaacatatctcctgaagaaataaatgatctcatccttaataaggtcgaagagattgagaatgaacaagaggctgaataatggccaagaacataaaagaaatagcagcattaattgaatttgccgcaaagcaagccgttcaaaaacaatccagcacaaaaaatacgatgattaaaacgggtcaagagcatgtacaatctgatgtatatgacacatacgatcctcttgtatatgaacgtacttctcttttgaaggactcctttgtcattcaaaacgaatataacggaatttcattagacaacaaccgtgaagacaacggcaaggatgttgctacggttgttgagactggtcaagggtacacgtatccagataaatacggctatggttacggaaaacctcgcccagtcatgaagaatactgctgaatccttaaaagatggacgattagttgctgctatgataaaagatttaaatacaagtggtattaaaacagaataacggtggtgtattaatggccagaaaaaagatagcatatgcaacaaaagaaaaggtcaacaaaattaaccccaaaaatgcggaattaatccgaaagtattttgtctttaaaaacatgaacctttcggaatccagtaaagtgggatatcaatcagatttcaatcaatggctggtatacattttagagaattacaataatcagcacattgtggatattattaaagaagatcctgatgatatggttgatttaattgaagactttgttgcattttgcaccagtattctaggcaataatgaacgaagaattcagagacgaatgagtagtattagctcattctttttatttttaaggaaaaaacgtaagattaaagagaatcccgttgacttcttagacaggcctaaagctggaactggtgaaaaacttcaaattaaacagaccttcctaacaaaagaacaagtcgaagaaatcagaaaaggacttaaaaagaaggaaaatattcagttagagctcttctttgaattcggtctctcaacgatggccagagctaatgccataagcaacgttaaggttgaacaaattgactttgaaagacttcgggtggaagatgtcattgaaaaagaaggatataaagtcaccctcttcccttctcaaagagctattgatcttgttaaggaatggctggagtacagatccgaaaacggaattgaatgcgaataccttttcataacaaagtacggaggcatatggaagaaagctgaaaccggaactttacaaggatattggataaagagaatcggagaaataattgatattcctgaattacactgtcatgatttaaggcacagtggtagtaaccttctgtatcacagtggcatgagtctagaggacgtgtctcaattattgaaccataaaggcactgacgtaacaaagaatcactatctagaagtaaacaaagatgctattcaagacaagaaagcaaaatttgaagtgtaaatgaaatccctcttttatgcagaatcaagatccttctaccgaagggttttgcttatggataaaaccttaaacttatttccatatttgacgataatatggagaggtgaaaaatatgaataagacaatacttaaacacaatttagtacagatgaatagtcgcgacctgatcaaatacatacaaaaagaattcccgcactctggtgagctctacacagaacaaaagcgcaaatttcaaatcctaaaatcgctcaattcatcagatttaattttagctatttcccgtatgagtcgaattgaagcgtccttcgatcatacgaaaatgtggacagttggaagtgtgctcataggaacatgtttactatctctcagaattatgtttagttttaatttgctttggtatattctaatcgcaacatcgatttgccttctcctactttttgttgtacgaaaggatagggacattgttattactgctacatattttaaagaattacttgagcagattaagtccgaaaaaggaaagtgaccctcccctttgctagttctacacttttggaaatcatgatataatgtaggaaaataatactggtggtggttggatgggctataagattatggcttatggtggctattttttattcagccttttcttctgtttaatggatggctggagacctttgggggtttttctgataattggcggtttggcttatttagcgctcgaaccttacagaataaaaaatgcaactgttgctgaaaagattagaaaaaatgctgaaacactaaagacctatgatagcgaatttaaccctgataatttctttagcacttataaaactaaaattgcttacaatgaagataaatctatccttaaggtatatcagctaaatggagaagaaataaacgagtatgttgtcccttttgcccaaattattcaatctgaaatctcactggatgaccaggtgatttcgaaggttgccaaatcggggattattgctggaggattattaggcggcggaattggtgcaacaattggtggtttgtcagcctcctctactcaaacagaaatggtgaagtcaattacgcttaaaattacagtcgaaaacctcaaaaatcctatacactatatccacttcctcccttctcgcgaggatgatggatatgagcctcaaggttataaaaaagatgggaatatcatacagcaagctttaaaaaacgctgagtattggcaaggtgtcatggatgtaattatcaagaaaacaagtacagtcgctcaataatttgagtggcttttttatttgctctgattagccccacttgaaaggatgtgacttatttttgagtcaagatttaaaaataatactgaccccaaaagctgatacctcctcaaagactgtcgaacagttaaatcagcaaattaaatctttagagaaaaagcttaattcccttaatttaaagaccaatattgatgcctctgctttaaagactctcaacgaattctcctctgcagttgacacttaccaaaaacatctcaaatccttcaatcaaacaattaaagaaaccacaacggttaccagaaatgccgatggcactgttgaaaagctgacgcagcaatataagaaaaatggcgaaatcattcagcgtgaaaagaaattcatcgacaatcgtaatcaatcactacgtgaacaaacccaagaagttaacaggcttgctcaagcgactgaaaaactaggtcaggtacagaaaagaacagaacagaagaattctcaaggacaaacgacgagggtaactcaaaagaaccgcaatggcttcgatgatataacatatacgactgatccaaagacaaatgctacgtcatcaaaagttacaacaaattacgatcagcaacgaaaagcaattgaacaactaaagatagatttagaaaaacttagacagcaaggaattgtaactgacaccaccctctcttcccttgggcggaaattaaacactgctcaaacagctcaacaaattgaagcattacaaaacagaattaaaatgctcgatgataagtctgctgctgtggctaaaaataatgaactccgaaaaactattgagctttatcaacgccaagcacaggtaaacgtacaaaaccttaatacgcgttatggcgatacgatgggcgctggaaatagacaagctatccaagagtacctcaatgcagttaatagccttaatgtaagtgccggcggaagcaatatcagagctcaaatgcaaagcttgaacatgcaatacagggaattggcttcaaatgcgcaagcagcagctagtcaagcctcgtcttttggtgcggagctaacgcaagctttcaaaagtatgtctacatatttaatctctggttctttgttctacggcgctatatctggactcaaggaaatggtatctcaggctgttgaaattgatactctaatgacaaacatcagacgtgtgatgaatgagcctgattacaagtacaatgaacttcttcaagagtcaatcgatttaggtgacacactttcaaacaaaatcactgacattctccaaatgaccggtgatttcgggcgtatgggcttcgatgaaagtgaattgtcaactctaacaaaaaccgcgcaggttctacaaaacgtctctgacttaactcctgatgacacagttaatactttaactgccgcaatgttaaacttcaatattgcagccaatgattctatttcaattgcagacaagctaaatgaagtggataacaactacgctgtaactactcttgatctggccaactctattcgaaaagcaggaagcaccgcttcgactttcggtgttgaattaaacgatctgattggttatactacagcaatcgcaagtaccactcgtgaatcaggaaacgttgttggtaactcacttaaaactatttttgcccggataggtaacaaccgaagcgcaatcaaagcgttggatgaaatcggaatttctgtaaagactgcaggcggagaagcaaaatctgcgagtgagttgattaatgaggtagcagccaaatggaacacattaactgatgctcaaagacaaaacacctctattggcgttgcaaatatccatcaattgtctcgatttaatgccttaatgaacaacttctctatcgcccaaaatgccgccgcaacagcttctaattctgcaggtagcgcttggagcgaacagcagaaatacgcagatagcttacaagcaaggttaaataaacttcaaaacaatttcactgaattggctatagcttcatcggatgcctttattagtgacggattgattgagttcactcaagctctgggttctttgttaaaagcctccactggaataattaacactgttggtttcctccccctctttttgtgacgattagcactgctacattgttactcagtaaaaacactcgaactttagctacaactcttatattaggctcaaaagcaatgagacaagaaaccttagctagcatcggattagaagcaggtatgacccgtgctgctgttgcatcaagggttttgaaaactgctcttagagggcttttagtttctacagtggttggaggcgcgcttgctgcgttgggttgggctttagaaagcatagtttcatctttcgcagatgcaaaaaaagctaaagatgattttgaacagagtcaacagaccaatgttgaagcaattacaaccaacaaagactccacagacaaactaataaaacagtataaagagcttcaaaaagccaaagattcaagaaccctttcatcagatgaagagcaagaatatcttcaagttactcagcaattggctcagacattccccgctttaattcaaggttatgactctcaaggaaatgcaattttaaaaagtaataaagctttagaagaagctattgagaacactaaagaataccttgaacttaaaaagacggaaactaaagacagcgccaagaaaactttcgaggacgcttctaaagaaattaaaaagtctaaagatgagttgaagcaatacaaacaaattgctgattataatgataaaggcagaccaaaatgggacttccttgctgatgatgaagattataaaatcgctgcagataaagcgaagcaaggtatgcttaaagcacaatctgacatagcaagtggaaatgcaaaggttagagacagtgttctctcaatcgcccaagcatacagttctatagatatcagcaatactttaaaaacgagtatcaatgacattgtaggtaaactcactttaaaagatgatttgaatcctgatgatctcgataaattctcttctgcattgggtaaactccaagagaaaatgcaatcggcattgaattcaaacgatgaaaaagcatttgatagcgcgaaaaaggatctgcaaacccttttggagacctattcaaaatccagttcttctattgatgtctttaagttgagttttgataaggcacaaaagaacattaaagatggagataaggccatttcttctgttaaatcggaagttggtgatttaggggaaactcttgctgaagcaggtaatgaagctgaagattttggtcaaaagctcaaagaagcgcttgacgcaaatgatatcagtcagattaaagatgtaatcaaaggcatgtcagagtcaatgcagtttgactctgttcaaggcattcttaacggggatatttttaataacaccaaagaacaagttgctcctttaaacgaacttttagaaaagatggctgaaggaaagagcatttctgccaatgaagctaatgctctaatccaaaaagataaagaattagccaaagcaataagttatgaaaatggtgttataaaggttaaccgagatgaagtaattcgtcagcgaaaagttaagctcgatgcctataatgacatggttcaatatagcaataagctaatgaaaactgaagtcaataatgccattaaaaccttaaacgctgattctttacgaattgacagccttagaaagcttcggagagagcgtaagctcgatatatccgaggcagaattgtctcagctcgaagttaaatcaatcaataatgtagctgatgcgaagaaagaattacataagattgaagaaaaaatgttgcaacctggtggattttctaacagccaaatctctgcaatggatagcgttagagctgctcttaaatcctacatctcagcatctgaagaagctacatctactcaggaaacaaacaaacaagcgttaatagaatcaggtacttcccttgaaaaatggacagacgagcaagagaaagcaaatgaagaaaccaaaacgtccatgtacgtggctgataaatacaaggaagctctggagaaagttaatgctgaaatcgaaaagtacaataagcaagtaaacgactatccaaagtattcccaaagttatcgaaatgccctgcagaaagaaattaaagctcttcaacaaaagaaaaagcttatgcaggagcaagccaaactcctcaaggatcaaattaagtcagggaacattgcacaatacggtatagttacctcttccctttcctctggttcatcttctggtggttctttttcttctggtggtgggtcttactccggtaaatactccagctacattaattctgccgcaagcaaatacggtgttgatccagctctaattgcagctgtaatccaacaagaatcaggattcaatgcaagagctcgctctggagccggagctgctggtttgatgcagttgatgccttccactgctaaaagcttaggcgtaaacaatgtttatgatccttatcagagcattatgggtggcacgaaatatctagcccaacaactaagcaaatttggtggcaatgttgagaaagcacttgctgcttataacgcagggcctggtaatgtaattaaatatggcggcgtccctcccttcaaagaaacacagaattatgttcagaagatcatgtcaaattacacgaagtcaatgacttctgccaattcctccattgcaagctactacacgaagaacagcgcgtttagaataagttctaagtatggtgctcaagatggcgcttaccgatcaactccacataaagggacagactttgccgcaaaagccggtactgcaattaagtctttgcaaagtggtaaagtccaaattgctggttatagtaaaactgccggtaactgggttgtcattcagcaggatgatggaaaagttgctaagtatatgcatatgcttgataccccttctgttaaagccggtcaaactgttaaagctggccagaccatcggtaaagttggcagtacgggtaattcaactggaaatcaccttcatcttcaaattgaggaaaacggaaagacaattgaccctgagaagtatttaaaaggtgtcggtacatctatttcagatgcgtctcaagctgaagcagaacgacaacaagcaatagcgcaagctaaatccgacctcctctcccttcaaggtgacattaattcagtaaacgatcagatacaagagcttcaatatgagatcgttcagtcgcatcttgatgaatatgacaagcgcattggtgattttgatgtaagaatcgctaaagacaaagccctcgctagtcattatctgagcgatagtaaagagttccgtaagtatacaaacgatcagaaaaaagctttaactgaacagcaaaagattcagagtcagaaggtttcttttattgaaaaagaaatcaaaacaaacaaaactctgaatgccgctcaaagagcacagcttgctgaggaattaaaacaagctaagattgatctcatcaatttccaagaagaagtaagagaacttcagggacagctcatccaatccaaagttgatgaaacgcttaacggtatagagaaatcaaccaagaaaactgaatccaagcttaaagatgttagcaacaaaatatccatgaccgaggaagataaagacaaggttaaatattatagccaacagattaagcttattcagcagcaacagaatgaagcgaagaagtatataaaacagttggaagcacaaaagaaagctgctaaagggttcccggatattcagaaacaaattactgaagaaatcgagaactggaaagacaagcagaaggattacaatctggagctttacaacacaaagaaatcaatcaaagatgtgtacaaatcccttgctgatgaagttgtctccatctataaagagatgtacgaaaagatgcgtgatattgaattaaaagcgcaccaaaaagcaacacaagacttgattgatgagatcgataaaactgacgatgaagctaaatttcaaagacagttaaaagagaagcaagagagtatccaaaaactcactgaccaaattaatcagtattctcttgatgactcagaatttggtaagtcaaaggttaaggaattaactgagcagttacaaaaggaacagttagatttagatgagtttcttaaagatcgtgaaagtagcaaacgtaaagaagcgttgcaagatcagcttcaaaaagacgaagattcaattaacaagaaatatgatgatctcgtcaatgatgagcgtggatttaaggaacttgagaaaaagctaatggatgggaagattactgatattgctaagcaactgaatgaattctctaaattcattaacagcaatatggagtccattggtaaaagtatctctaataaccttatcgataagcttaaagaagcttctaatgcccttaatactgtgaccaaaggcaatacaacaggcaaaaaaatatcttcatttgaaacaggaggatacacaggaacaggtttaggtgctggcaagcttgctattcttcatgataaagagcttattctgaataagactgacaccaagaacatgcttgaaactgtaaagtatgttcgcaatctgtctgataacgatctgaataatgaaacacctaaatgggggcaaggtggaaaattagcagctttgattaacaaagggattacttctattccatcaataattccgaatattaaccaagcgagcctatctaatagtttgataccaaatgttaagactgctaacctgccccctaccacaaccgttaattctaatggtgataaaacaattaacacaccaataattttcaatgttgataaacttactggtggggaaactggagccagaacaatgctcgaaaccatcaagaaagaagttataaaattaaatggaagcatgtaagagtctgtataatgcaggctcttcagcttgctttttgattggtaagggtggaattttatgattagagaaagtcaatatttcatgttcgatgatatcccctcttatgaaattggggcagtgaatgtaaacacagagggcggactattggaagagaccttcgtagcgaatagaacagtaaatgaaacatatacacgatcagcttctgaaccgtatgtagacagtgttaaacgtgaaccatatgaaatccctttaaacttttacatagaagatcatttagatgaagaaaatattcgaagagttgcacgttggctaaatgtagatgattataagcctctttcattcagtagtaatttagatatcatttattttgctttgccagtgaatgcaacagatttggtacacaactgctctaatgacggatatgtgaagctgacaatgaaagtatttccttataggtatggacgagaaacaactacccattggtatgacatatcatcaggttctaataatatagaaattaaaaatataggggatttagatatcccactctctcttgaattcaaaaaaatcggtgatggagacatcacagtcgaaaacttgacagcttataaagaacctctaaaattcacatcaattaaacatcaagaagttattaatgtagatgccaataaagagctgatcacctccagtgttactgggtatgagtgttatgatcaagtcaatgaacagtatgtttttttaacaagggggataaacagagttaaaataacgggcgaatgttgtatccggtttatatacagatataagtatttgtaaggggatgttttattgatttacgattttaaaccaggccatctcaaggtttctttagcaaaaccaaataaaaagaaaatcgctaatatagtagatttctctaacgcctctctaaatttgaattttgatgaactccacgatctaacttttaatatcccacttaaagcaagatataatttcaagatgaagccaaaccatgtggcagaactcataaaaggctggtatctcattaaggcagagttcttaaacagagttgaatggtttgtaataaccggattgacaaagtcagaaaatgaggaacaaacaatacaagttagagctcaaggacttccctacattcttcataaaagcaaaatcaaatcatatgaaggcatctctaaaaatctgttggaagttgccacagattgtcttaaaggaacttgctttactgtagactttattgacccctcttttaatgaaaaacgccgctcatttgatgttacctctacccgatatgagtttttaaagaacattggagaaacttttgaggctgtgcctatatttgatactgtgaacaacacagtatcattttataaaaaagaaactgtgtccaagtataaaggtgtccaattctctcctaaaaggttcatgattgatatggaagataccattgatattgatgaagttgtaacacgattagacattaccggtaaagatggaattgttattaattcagtcaatcctactggacaaagttacttggatgatttctcttatttcctctacccttttgaacgtgatgaaaagagaaatgtaattaagcatagtgattacatggatgatgatttgtgccatgcaattttagattacaatgaacttgtaaataaagaaggctcttctttttacctccttttaaatcagaaaaaagatctggaagcaacaaaaacaacacaggagaataccctcttcaccctagaaaaaattgaattacaacaaatcttagataagatcacagtagcaaaaaaagctggagatgacacgaaagaccttatcaagcaaagagatgccaaacaacttgaagttacatcaaagaaagctgaaatatccaccactgccaatcagatttccaagataactgaagaaatagcagtgttaaaagatcggttatctatggataagtttctcggtgaaaagctaatgaaaaagttgtcttattttatccgtcaagatgattggtctaatgacaacatttttgatgaaacagagctgtatgaaaaaggccttgaggaacttggggagaaaaatacacctccggtagacatcagaacaaacattgtcaacttattcactgtcaacaaagaaaaggatttttgggatagaatttacctgggagatataatcagattagttaatgacgattttagaactgatgtcaaagcaacacttacaggaatgaattttgattttgagcagcaaagtatacaagtaacactctcgaatggaaaaagagctactacgatagaacaagactttgcacgctcattgtatactgctaagaaagcatcaactgaattcaataagaaaaagattgattatgataccctactgaccaattacaatgcacgaaatgatcgtatatctgcacccgtagcaaacccaactatccgaaatgacgggactgctataactcatgttgtaaatgataatggatctgtagatgtatcaattgaatgggattttccagactccgatgaggataaatacaatatcgatggttttcttatccattgctactctgacacatcagatgatacctatctttttggtgcaaagatgtcagctgaacaatatttatcagttagttatgataaacgaattgcaacattaaccggtcaagtttcaaataaacactatacatttggagtccaagcctatcgcacagtagagacgtccattgatagcagtggtcgaatactatctgatattgtacagcctaaattcccctcagaaaacccctacctcccctcttctactgtagaagtcaaaggtaagcttaatggctcgaaatacactgtctcctcaactgaacccgaagagccagaagcaaacgatttatggactaatacggttaccggtgttgtttcctcttatgacggcgaaaaatgggtttccagtgaccagaaaactgctgagttagttgaaaccacagcagcacaagttgacactaaactctccgactatgatagtcgtgtccaaaacattgagctcaataaccttttggtcaatcccctgaaatggaaaggcggaaatgtttctgcatttggtcgtaaatattatgctgatgttagttatgactcaactgttttaaacttaaatacaatcactattcctatccttattaatgctgtggatgcttcagactcaaatccaactgttgtggattacacttataacgaagcgtgggatatgatccctaaactcaaaaatgacgggtacaacattattttagaaccctaccccttcatcgcaaatggaacgatagctgaaaccgattgggcaccttctgatctagaccaatggttcgtagcatggaacaacatcctgcaagacttcgctaaaaaatgcgaacaatttaaattagacggtttatacattgcttcaaacctagttcatatggaagactcaacagaaaagtggaaatcagttattacaagcgttaggagtttattcagtggaaagatgctctaccgaacaaattattgggtaaccgctgattgggctcccgaaacgattgctgcctacaacaaaaagctgaataatcctctattcggactagtcgatattattgcaatagcggcttactttgaattaactgataatcgaaatccatctgtcgatcagctaattgatgctatttatagcgtaccgttatacggacgcggacaaaatatattcaaggaaatcaaagcattttatgataaatggaataagccgatcttctttggtgaacttggcatcccaccttacagtaactctcctgaacagccccataacgcattcggtgacctaggggaatacaatgaatcaattcaggcgaattggtttgaagcatgggttagagtttttcaagctcaagattggtggcaaggatattctgtatatgcaatttcagatgagaagtctgtttacaacgtaattgacaagaaagctgaatccattattagaggacaaacattaggtggtactaagggcagactgcagagtttagaagagagagtcgcgcacttagaagaattgctcaaatcaattacacaataagaaaggacggtgaatttagtttggattttcctcagctctataacgaccctaccctttctcaaaaaaggaagggttcaatcgatgacccttatttaagctatagtgaaactttaactgtttacaatggtcgagtcttacttacagaagtacctaaccgtgagtacagagtcgaggttagtggtgacagtaaagaatggcgagaaattgaagatggtgaattagaagacaactactttaaggttgattaccttatgggagttgtctttttcaatggttcaaatgaaggcaaatcacttacttttgcatatcaaggagaaggcgcatccttcttccctgcctcaagaatttggattaaacgacaaggaaatatggtcattgaaacgcttcaaggcttaattgatgatgctgaagatgccattattcgtatcaatgaacgtattgctgaatgtgaacgtgtcaccaagcgctgtattgaaataacaaattggtgcagacaagcaacatcagattatgagtatgtagttgagaatactaggaagatttacttgccgtttgtgtacacctatcaggatttattgaacacttatccttcccctcaaattggttggactgtcactgtaaaagaaacaggcattgaatatcgatgggatggtttcgactggataaatattagcgtgtcagataagtatgatggtttcaacattgtttctagctatgtagagccttacaacatcagatcagtatggttgagaacgaacaatgctcccaaaaagatgaggataaaaccatctgtagaaccccctgacggaagcatggtttggattagaaaaggataaggaggagtatatattgagcgacaatttaattcccgtaaacacaatgggctataaggacgaagaaacagagcaatggatacccattgatgccatagggttaaaatcaaataatattagatatactgcagacgatattcaagaggcttttgataaagcttctaaggatattaaaaacgtaataagcacagtcgattctggtttaacagatatcacaaacactattggagacatttcaaaaatccctgcagctggtgcaacaattgttgataaagtcttaaatgagtttatcagacgaagtgtcaatgttcaggattttggagctaagggtgatggtgttactgatgacactgaagctttcaaagctgcctttgccagcgggaagcgagaagtttttgtacccgcaggtatttatatggttcaaggattacatatcccttcttatgtcagactttacggtgttggatcaggatctattatcaagcttcacccaactgctaccggaacatcttgtgtgttaaccaatagcgactacacaaacggaaacgaatatatcttaattgaagacttagacctcgattggaatttagacaaaaaggacaacaccattacaaatggaacaaatgcaaactgtgtggggattgttaactctaaatttgttcgggttagaaacgtcaatgctcgtaatccaggtgtacacggttttgatgtaagctcccctgtttggaactcttcttctgatggagcagatcattatcagccaaatggtagcaaatatgtttggattgaaaattgtactgcaactaactatggtgatgatggcttcacaactcactattcagactacatcttcttcactaactgttacgcctatgacgctaatggatccgcacacagcaaaggagcttcaaattcaaacggttttgaaattgatgatggctctaaaaacgtatggcttgtgaactgttacagccgaaaaaattgcaggggttttgaagtcaaagctcacaatagagcacctgcagcaagaaacgtaaacttaataaactgctattccgaaaatgatatccgcgctttcgactttagacatattggcttccacctagcctccgaaaaaatctccacaagtgcatttgacattaatgtcgttaactgcactgcacaacatcctattttcagtgacctttatcaaggtttaaatcctcgcgcactagtcatttccgcttatagaaatgtcaacgtttcgaacttcaacgcaattggtgatccaacctatgattataaaaacactgcaatcatcaccacccaatataaaagcaaaaatatcaacctaagcaacatcactgtttcgggatttacaacagcgagtaacgatatctatgtaatcggtggagctcaaaaatcagataatgtaaacatctcgaatgtaaccattaaccaatctgctttagttggtattgctgtgggaagtaaagttggctcagtcaatatcaataacgttaacatgacgggatcaaacaaagcaggttcgataggtgtttactgcacgaattcacaagctaatattagcgctgcgatgtgtgaacaatacgctactcccagtaaaattgccggaaaaacctacacgtttatcccgaataatttcaagggcggtctacgtggggctacgacttctggctatgctaaaacaaatactagtgcagtattagcttcatcgggtgaacctcaagcacttggagatgccactttagttggagctactaccggaggatgcgttgcaaagggaacaagaaccaacgttttcggctcatcaggcggaagctctgtagatggatctcgtagcggtgtttacaactccaatgattctcatatcgaggggcaaaatgtatcacgtgaaatccacgcttctggaggtgtaaaacttggtgaaaatgatcgctatatggtggttggcggatatggcgctactccgtccagagcaaatattaaatggatgctaaactccatgaatggggatataacatcggcaggaaagatgaatggcggagccacctttagtgattacgctgagtattttgaaagtcttgacggaaaagcaattccgacagggacaattgtcactcttgaaggagctaaaattcgcccggcgagaaaaggtgaagatgtacacggagtaatctctgaaactgcaggaactattctaggaggagctgatattcactggcaaggtagatatttaaagaatgagtttggtggatacatatatgaagatgtggtcaacccagaaaccggtgatgttaagaagctgcctaaagtaaaccctgagtggattgaaaaaatagattacgtccctcgtgaagaacgtcctgaatggaatatagtaggattgcttggacaggtttatgtgaaagtggacagtactgtttctgtgggagatcgaattgaaggtaattatggaatcggcacaaaatcagaagacaggttttactcttggaaggctatggagattgtaactccatattcagacaagctcggttacggcattgccatctgcttaattaagtaacccttaaaattaaaggaggtggttatgttctagttaaaatataaattttattcaatttacggcattcaaaaacagagataacaagagcatacgtgagataaagagagatagggatttgtccccttctctcttttttgtgctcaaatttaatttaggagagatgtttaatatggctattcaagcgagacaaatgttagtatcaccagacaaatattcaatcaaatgtccatatgcattatctgcttcattcatcacttttcacaatacatacaacgacgcaccagcgcaaaatgaagttagttatatgatcggtaacaataatgaagtttcttttcactttgctgtagatgataaagaggttgtccaagggattcctacaaatcgtaatgcatggcatacgggtgatggatcaggtgtgaattcaggaaaccggacttccatcggtgtagaagtttgctactctaaatcaggcggagagcgctataaaaaagctgaagcgttggctattaagtttattgcacaactccttaaagaacgtggctggggcatagatcgagttaaaaagcatcaagactggtctggcaagtattgcccacatcgagttcttgatgaaggacgttggaatgctgttaaagcttctattgctgctgaattgaaagcactcggcgggaaaacttcttcctcatcttcaaagccaacaaaagtcgttaaaacaaatggctcttatgttaagaacacagttatcgcagacagtcttaatgtgagaactcagcgcaatgcgaactcctctattgtacttgcccttcctaaaggctccactgtccaataccaaaaaggatcaactcaaaatggttggggttatatcaaatatacaaactccaaaggcgctacatacagcggatatgtaaatgtgaaatacattaaaagtgatgctgagcttggaaaatcaaccccaaagcctaaacccacttctaagcctgatagcagtggaatcaaatctgtaggcaagattaaagttgtcggagtaaaaagcgctgctatcgtaatggacagacctgataaaaacaaagcgaagaatctcggcactgtggagctaggtgataccgtcagcatttctggctcagtgaaagggttaaacaatgctaagggttactgggaagttatctacaaaggtaaacgaggctacatctcaggacaatttggctcaaaaatctaaatatatttaaatatctttgagaatgattgtagctcaaagtgtatcaatgattatttaggaggtgatgtgacattacctcctattttttatggaggatgattgcattgtggctgaaaaagaaaactatgaagttttaaagaccgaggtcgctcatataaaagaacgtcttaaagaacaagcagaagatagaaaaatcatgttggaaacacaaaaaacaacaagtgaatcgctcattaggcttaccactgttgttgagaatcaggaaaaaaaccttgttgaaacaaaaaatttgttcaccactgagatagctggactaagaaatgagtttcagcaagttaatcagtcgcaaacaaaatggcttcaaaacttattagaaggaacattcggcaagacattaaagattttagttctaattattctcttactgcttggtgcagagatcgctggtgttgatatcaccaaattagctaatttataaggagacgatttaatgactaaaattaactggaaagtaagacttaaaaagaaaacattcctggttgcaatcttctctgcaactcttttgtttgcacaagcaattgcatctgcatttggatacgacatttctgtgtttagcgatgatcttactgagaaatttaatgctttgcttacatttctaactgcaatgggggttgtagtggatccaaccactacaggtatctcagacagcgatcaagccatggaatacacagagccaaaataacttggggagtttatctccccctttttttcattttcaagaagaaaggaatgattgttgattatgcaaataggatctggatatatcggaagtccaatgcttgagaagtcagaatctaaccatgaagtaatcccctccccacctgcaacctggacgattaaatattctttctataagttcagcttttcgaatgatcagaaatgccacgtatcaatcaatggtggagatcctatctatttaagggctggacaaggctttcaaatggacgctcacgattcacctatcacaagcttcaaaatttctgagtcaggaattacatataactttttgggggcgcataaatgagttttttcaatccaatggttaatgtctcaattgtcactgggaagtctgcttatgaaatcgcagtggacaatggtttttcaggaactgtagaggaatggttagcttcactaaaaggtgaaaaaggcaacactggagctactggcgctaagggagacaaaggtgatactggtgcaaccggtgctaaaggagctactggtgctgccggtaaagatggaaaatcagcatatgaattagccgttcaacaaggcttcactggaacattagatgagtggcttgcttctctaaaagcaacagcaaactgatcatatacccttctctaacgaggagggtatttttttcgtttcgttcataatcgaattattgatttgtttttaattttcactcaaattccctttacatttctttcctccaatgcaactatataataaaatggatttgaaaggggtttaggacttggagaacgaaaaggtcattccttatgatttagtagcaacaaagatgaatcattggtatgtggctattaaaaagaattgggtcggtagagcagaagaaatgcgtaaagaagttatgcaggaaataaaaattatggaagaaaaccaagatgttttactatactactccctacttgagtttagacataagctaatgttggcatatatgtatcctaacgctataaaagacattgagaaaaactatggtgagttaaaagcatacgaaggccatgaaaacttaactggaatgctcgaatattactattattttttcatgggcatgttctattttagacaaaaggagttggcattctcccttaatcactatagacaagctgagagatatttggattcaattgagagcgaagatattgaagttgaaaaagctgaattttattttaaattgtcagaagtgtattaccacatgaaacagacttatttttcaatgaattatgccatgagggcttacgatatatttaaaaagcaacctgctattgacgggagccctacatacggggtacaaaaggtacgctgtcaattcgtcatatttggtaatttattggacagtatgaagtttgatgaagctttaaagcaagcatacaaagcgtatcaggaagcagtagagctaaacaaaagtgaaaagaatcgtgggcatttgatgcgttcagcactgtttaatattggattatgttataatcaaatggaagaacttgataaagcattttttcactttaataagtcacttcaaatcattgagccggaaaatcatgattacgctgctaaaacattatttgttatctccttcttaaagggaaggcaaaatgacattgaaaacgcaaaaaaattttatgaacaggccaaacagttggctgaacggcataacaatgaaatggtacttgaaaagttaaaaatggttaaaggacttttcttggactatgatttagacttagttaggaaaacattcgagttcttcaaagaaagaagtatataccctgacatggaaagctatggtgtctctgtagcagattttctcactggaaaacaggatgcttggggtgcagttgaattttatcgtttggcaaatgaagcaagaagacaaatcaaaaggggagaagcaatatgaaaactaaactatttatctgtgcagttctattattcggcgttgccggaacagtgggtgcttcctatctccaacaacaaaatgatacgttcaaggttgctgaaagagccgaaacgtaaaaaactaatgactttgtaaggagaacagagggagctgctctctgttctcatgatttatgtccacccgtcaaacctgctctatgcaaagctgtgcctccaggtgtataagaaacagctcgtaagatcgctttagatccgtatttgtttcttatcccgtccataacgaatccaagctttcttctcttctcattatctttttcaaacagacttaattgttgatttacatcatcctcaatattggataaggtaactgaaacacttcgtaccgttttgcctgtatagaatttatcaaacaacatcaagcaatatcgataaatatccattgtgatatttgtaggcaaatcaatcgttttagctctgtgaaagccgccgctgaactcatctttactgtaaccaatacccaagctaattgtgcgccctactttgttatgtgttcgtgctcttcgtgcaacctcttcacaaatctccaagagaaccgccttgatatcctctttcttcgtatagtctctaagtaatatctgacttttcccgtagcttatttgcccttgcatcaaaggagctccaatttcagaaaggtcaattccatgtgcatgataataaagctgattgcccataatgccgaatcgtttttcaagtagctctaatggatatttagctaattgaccaacagttgaaatccccatccggtttaaattcctctccatcctccctcctattccccacatttcagataacggatgaacacaccaaagcttatttggaacatcttcatatctccaccgtgcaatcccagtctttgttttcttactctctaaatcaagagctaacttactcagcaacatattgtcaccaataccaacagtacaaactaagccaaactctctcttcatactgctctgaattgcttctgccatgacttcaggattttcttttcctgcatctaaaaaagattcatcaattgagtacgtgtgcacacatgtttcaggaacgaacctgtaaaacaatttagtgatttcagttgaaactctgatgaaaagtttcatttgcgggtttactatatgaatttttggatcatctggaatctcaaataaccgggagccagtcttgattccataatcttttttaagtgcaggagacgctgctaagacaacacttccctgtctatccgtgtttccgactacagcgagataacatgtcattggattcaatcccattgttacagctgaaaccgaagcataaaaggatttcatatctacacaaagtatatttttacgtggaaactgtgagtaatcaatcattgtaagcaactcctatgatgtcattcatggtgatgtatacggtttgatcatgatgatcttttacgtgtaatttgtgttgttcgtaattgagatattgaactgtaccgattaaatcctcagcaaccccttctttaaagagcttaaactttagttctttattcaacgccattgcttcagaaaccaggatgtcaatctcctcaatttgttgctcatctaaagatggcttctccattttcgaaacatctaacaagtcctgttttaattgcgttaaatgttctggaagcatcatggaagtccatttgatcgcccctcgatctctaagcattttgaatcactcctttattgatctaatattaacagaacaaatgttctttattcaatataaataagaacaatagttcgatgtaattgttggaaatgactattcagcaagtatccactaagctttatgggctgctctagtcgatacttgagttcagtttcaagaaatccgcaggaaaaagtaaaaacagccgccagaagaaaatgcggctgtgtgtctttatttgtctttctcctttttttcattcggcagctggatggaaggcgtcacacctgatccgccgcttccgttataaaactgcggcacctctccttgaatcgctttaatggagaccggaatattatttgtcacgactgatgttttactggcaaacggaataatgaccttcactttaatttccacaaaaatactgatatcgatcagggcattgttaatgccgtacggctttatttttgttttcacatcagttaacgcatcaccgatcaggttaaagcgcacggggattttcggccccagatttccgagaatgctgtttcccgtgacctgccctaaagggatgttaatcataatttcatcggccgttttcgcgcctttttccgtttcatgctgcttattgttcgactccgcttccttcaaatgagcctgaagctgctttgtcactttcgccttcatactgttgaccatttgtgtattaaaatccatcgttgtgacttttccgttttcatccgttttcatatcgaccatatctttcacattgtcgctgtgagacatgtattcttcaatggattccgtaatgacctctgtcgccacccgtttggtttccatttctcctatgttcatcagcaccggtttgattgaggagttgatcatccagaggctgatgaccgtcgatatgataaaaaaagcaaacgacagaagcaacacataccgaaaaggcaaaggccctctcttgcgaagagcgctccggtatctaggcaagaaaaatccccccttacatatcacaatgtatgcttgtaagggggacatagtaatttattttcacacttaaaaactccggcacaaagtattgcttttctttctgatcacgcaaatgacgggctatttttatagcctgcttattttcgtttttctaatcctttttctttttatgctttcttttgaaattcccttataaatttgatgtgaattttccatttcattgcttagctcttttgtgttttcttccatcataggaattcttgtatttacaatcttagatagttcctggttaaattgtttcatcagtttagcttggtctttaagatttacggcaatgtcagtatatagttctatttcattaggatttaccccatcaatgacagctttagcataactcctagcagcttcatgtgggtctgcatatgtaatgcttgagccattatgaattagcaaaatttctttcttcatgataaatttcctctcttgttgaaaatcttaatatatcttataacacaaatttcaaaaagaaaagtactacattataacttgtctattgtcaataaggctccaataatcacagacatatatttggaattagtgtataatgattcctgtacattaaagcatgctcactcaagggagtcttgctcatcccctacgaaagggggtgatgcttatgtcaacatttcaggcattaatgttaatgcttgcattcgggtcgtttataatcgccctgttgacgtatataaataaaaaatagacctcccttgagcctggaaacctgaagggttaggcctatcatgaacaactgctgagcaagccctttgatgggcagctttttgtacagagccggggtgctaccaacaccctggtctttttattttatgcatttccacaaatcaaatgcaaaaaataattatataactgtatcatctacactaattataaccacataaaaatggtatttgcaatactattgctttatggattaaaccactttcactttgcctaaggacacttatgctgctacatcatgcaattgcaatacttttgcttaactgtttaataaatcatcatctagctcaatagataaaataccatcgtcttcatctgttgtctcttcaataaacagactttgaatgaagtcagagaaagaatttgcgaccaaaaatgtgtcttttattccatttgtcaattcatgatcccaaaaataaacttttcctgttgcttctcctttcacaccaagacaaatttgatctcctccgtcaccatcagcaatcggtataatccagtccggcatttgttctgaaagatcctcttttaatttgataatattagcatcattgttattaagaccgtagaaatatcccaaccggagattaccgttatctgctagtggattgtcctctaaaacagggaaaaacacattatcttcctctatccagcattccccgtataaattgagaaactctttatattcatctgttatgtcgaaagaattttcgtcctcaaactttttaaggacttgatgagaatttatgttcttatcaagtcttatatctaaataaaattcactcatttttttcttgattgcctgtatacccattaaaatcctcctcttaaatcagatgccgaacctacgtgaggtatattaccatgtaaatccatagggattaattggatggtgttattgtctaaatgatgcggtgttaatctaactacttctttcagccatttttcagcttctttttgggttttaaagcctttcattttttgaatacgtttataaactgctggaaaatcctttttagtacctttcagttctcctgatttaaacttaatcgtccctttgctccatggtgtaaaaaccggtctgccatctataaaagtgacgggttctcctttagtaactgcattaacgtcaggtctatctgagtgccatttaccgttaccaggagtcccttcccatctcccatgatttctaggcaaccttgttctaggattggcggactttattaactgaagcagacgatcctttaaattctcaccgttaactacattataaggaactcctccagccggaacaacatcgtaacgtggattataaggcaataaatcagcaattgagacatctttcagtttttggcctgctttactgactttagaggtgacttttcctgctacgtcagcttttgtaagagaaccggctccctttgtgcctactacagaggtaactaccgtacctatcgcatatgtcacccatcttgatctggagtaagcatctccatttaccatatctttttgatacgattcctcaatagctgttgaaatggaattatacgtgttaatcggatgagcaactgcccctatgataccttcaacaacttcatcaggcttgctgatcagctgccataaacctgttaccgtgtctttcccgacatcatataaaccaacgccggctccttttaaaatatcccaagtcacttctccggcttcttccatctgttttgcttgttcaagctgcatcacatattgttgttgggaaggttcaaggttttcatagccgatcttcttcgcgatttctaaatattcatccggatcggtcacaccgtcagcgagctttttcttcagatccttgatttcccgctctttcgcttcttcctttttaatcgtcaaataagcatccgaatgtcttgcaatctcgccttttttcttatgtatgtcactttctctgtacgccttggcgttatagtgaagtggtgttgcgtttttccctttacccgtggcattttgaagctgttgaaagtcggcttggatgaaatgctcgttcgcttcggtttctgcatattccttcgttagatcatgatcgagctttccgagcttgtgtatggtattgtcccgtttcttatctgctgaatccagcttttgatcgacatcctctgtagagaaaacatcaagatgaacaatatcacttatctcattaagaatatccctcatttcattccgttgctcttgcatgatggcttttgacttattcttcgcatgaatcaactcatgctctaaaaatgactcttccacaaacgaatcggctaatccggcatcagctacttttcctgaaatactgttaagaaaagcaatcttcatatcgatcagatcaagccagctgtctgtaacaccagcgtgatcttggaagaatgctttaatgttatcagcacctttacctgaaaactcgctgtcatctaaatcagccattccttgaaatgcttttctgagattgataaattgttctctaatctgatcgtattcttttgctcgcttttccgctgctgagattaacgaggatgcttcaaataccttcatatctgtctccttcccactcaatcttatctaaattttaccacataaaattacatgtaaggagagcttcttccttttgtcgaaggtctctttcttaggagatttgaactttaacaaaatcttaaaataggcttaattcagttgataaaaaatggaaaaggtgatactatcctcgcggaaggaggtattaattgtaaaatatattatttatttacatcttagatactcatagcaggtttaaacagaagaaaaaggagtgtaaaccattatgaagtatgtgtcaaaaagcatttggttagttgtaatagctctctctttattattctcttgctatcccctccatgatgtaaaggcaacggcaaacaaagaaatcactgataataatgcaactggcattgacctaaacaaacgtatctcaacagtaaacgaaaaaccgcaaaacaccgattcctctaaaagagaattagctggatcagaaagtaagttgcaaaaaattgctaaggaacaaggaatggatgttgaaagttcatatcagacttatatagcttatgacaaagatggtaatcagacatcatctggacaagtcacctctgaaaaccaacggaaaactgttgagaaaaaagcaaaaagtattatctatttcagtcacacttttttaggtggaaaagttaataaagtgatgcacggagttgaaatttcaaaaatagtagggattcctcctgcgtcagcagaagtacaccagggtttatgcaaaagtggttattataataaacagtttacttgcccccatactattagaaagacctttgtagggcctcaagtgaaaaagggatcggaagttcatcaatttattaatgtaaacaaaacaacattttggaagtatactggcggcgcaattgctacttgggcagggaaaaaaccaactgttagaacgatatcctggactgaaggattatacctaacgaatatgaagggaatgtttttcccctccaattacacagataagcaatcaggattaaatatattagctccacctaatgcatttattaaatgggtgcctagcgataaaagagtaaaatggggaactacagaacgcaaagcatataggaaatggtatgataaaaaatacggcaaaaaaacttgggtgaaatttgagattcatcatcaactacctagagagtacggtggaggaaatcagacaagcaatttaattcctatcgatgtgaattttcacaggaaagaagtaaatccatggtgggcttcttatacaaaaaagaagtaaaattgtagatgaacgtagatgaagactcctatgcggagtctttttattctgaaaccagtttataatactctcggatattcggattcacttcccaatatttcgttccattggaagaaactaacatatcaaaccatatttcaaaattcgaatctaagttaatcgcatcttcaatatcatcaattgagtctagatatagcatataacctaatccattttttgatttgtttgtgtctatgacatatcttccatcaaaatgatatccaattaaaacgtatccctctgggaaatcttgaacctcattatattcaatgattccctctaagctaagtatttcaatcccatcaaacatttccatcccattgtgctgtaacaaaaactctttatagtcattagggaaggtaacacctagcttctgttctatatcgctaatttcttgaggactagcaggatctttgaaatgaaaagtagcatcttccatgacataccctccatgatgaaacatagggaatgttccgtatttagaaacagcttcctttattccattaagagtcatttgaattaacttcccttcttccatataactttccctcctctaaggtttagaccactaaattttaccacacaactttatttgagtgttttaaaatgacaaaatcaaatttacaatctttggttttatatttataattaggaaggtttgtccgatatagagacagaacaaacaaatttgggggaattacattgaagaaatggttgttaggtattggcgcattatctctaagcttttctttggctgcatgtgggtctgattctgcttctacagataaaacagattcagataaggctaaaacaacgcaacaagaagaaaaggatacaaaagagacaaagacagactctcaatcaaacgacaaaagcaataatgacaagaatgaaaaagccgaaaatgcttcaaagaaggattcgtcggataaaaagacatctgacaataagaaaaagctagtcgatgtaacacttaacagaacggttgatggagacacgattaaagttaactataaaggcgaagtcaaaacagttcgttatttgcttgttgacactcctgaaactaagaaaccaaactcttgcgtacaaccatatggtgaggatgcttcagcaagaaataaacagctagttaacgagggcaagcttcaactggagtttgataaaggagatcgcacagataagtatggcagaatgttggcttacgtttacgcagatggcaaatcagtacaagaaacactgcttaaagaaggattagcacgagtagcttatgtatatgagccaaacacgaagtatttagacacgtataagaaagatgagcaagctgcgaaagataaagacttgaagatttggagtaagaatggatatgcgactgataaaggatttaatggctgcgcaacgaaaccgaagaaatcagtaagtgtatctaagccggttcaaaagtcagttacaacacaccaatccgagacacataaatcgaaccctagcaattcaaattcaagcagttcagcatcaagcagctcttctaactctgcacaagcctccccttctgctggaggaacagaacactttgcaaactgcacagagctgagaaagaaatacccgcatggcgtaccaagcactcaccctgcttatacatctaagatggatcgcgataatgacaactttgcatgtgagaagaattaatccatcggaagccctctgaggcttctttttttatttgggtatattctatctaaataaaaaccacagagctctgtgagggactctgtggtctatagtggctgttaaacccctatgatacatcaattaggatactttaaattagattaataagcaagctgatctaaaatgtttcgttaaaatgaggattttataaagaaattccaatgcacatgatataatctaactacacttacaataagaagaaaggatgaaatacttggcgttacacgaaaattcaagaatagcagtttattcaagaaaatccagagaagacagagattcagaagatacactcgccaaacatagaaatgagctagaatatctcataaaaagagagaactttaaaaatgttcagtggtttgaagaagttgtttcaggtgagactattgatgagcgaccaatgttctcattattattgccaagaatcgaaaatggtgagtttgatgcagtttgtgctgtagcaatggacaggctctctagggggtcacaaattgattcaggacgtatacttgaagcatttaagcagagtggaacattgtttattacaccaaaaaaaacctatgatttatcaattgaaggcgacgaaatgctttctgagtttgaatcaataattgctcgaagtgaatatagagcaataaaacgaagaacgattaacggaaagaaaaatgccacaagagaaggcagactgcattcagggtctgttccatacggttataagtgggacaagaatctcaaagctgcagtagttgttgaggaaaagaaaaaaatatatagaatgatgattaaatggttcttagaagaggaatattcttgcacagtaattgctgagatgttaaacgaactgaaagtcccttccccatccggccgttccatttggtacggagaagttgtttcagaaattctgtccaacgattttcataggggttatgtatggtttggtaaatacaagaaaagcaaaagcaacaacagtattgttcaaaataaaaatctagatgaagtattaattgcaaaaggtcatcatgaaaccatgaaaaccgatgaagaacatgccctaatcctgaatagaatagaaaaacttagaacatataaagtggctggaagacgtttaaatatgaatacccacaggctttctggtattgttagatgtccttattgtcataaagcacaagctatagaacaacccaaaggcagaagaaaacacgttagaaagtgtttacgaaaatctgctgaaagaacaaaagaatgcgaagaaacaaaaggaattcatgaagaagtattgttccagtcaattatgaaggaaataaaaaaatacaatgaagctctcttctcccctactgagcaagatgttaatgatgactcttatacaactcagcttattggtttaagagaaaaagctgttaaaaaggcaaagggaagaatagaacgcataaaggaaatgtacttagatggggacatcagtaaaacagagtacaaagaaaagctgaaaatttcacaagagacacttcaaaaagctgaaaatgatttagcagaattaattgcatctactgagtttcaaaatgctcttagcgctgagacaaaaaaagaaaaatggagtcatcataaagtgcaggagatgattgagtctactgaggggatgtctaactctgaaataaacttaatactaaagatgctcattagtcatgtaacgtatacggtcgaggatttgggagatggtacgaagaatttgaatatcaaggtctactataactaggtttatgtcgtactcaatcaataattcttacgacagatccggttacgacaggcggaaaaaaggatacgagcttgccgaagaaaaatgacagcagaatgacaagcagacccgatgccaaaatgcttccgtaaatggctgaaatcccgtactccttaccgatggaaataatcggcgctaccgcggtgaacgtacagccgagcacaacaggcaagccgatgccgaaacatttattcctccatacttgaagcagcgtagccgccccgcacataaaaatgtcaattgatacgagatatgtcagctgttctgcgttcagtcccagtgccgctcctacaattaaaggaacgacgacggcgccggcatacatggcaagcacatgctggataccgagggaaagtgttttggcatagccgtttttcatgaacggacctcctgtacaaatgtcacttttccgtcttcaagcgattgaattctcgccagtgattcgacccggaatcctttttttaccagctcgtctcttcccggctgaaatgacttttcaatgacgattccgatcccgcaaaccgctgcgcctgcttgttttacgatggacaaaagcccctctgccgcctgtccgttcgctaaaaagtcgtcaatgattaacacgcggtcttctttcgagagatgatttccggagattgcaatctgactttctgtttttttcgtgaaagaatagacggacgccgtcagcagatcatccgttaacgtgagagacttcctttttctcgcaaagatgacgggaacgccgagttcaaggccggccattaccgcaggggcaatgcccgaagattcaattgtgacgattttggttatctcgtctttttcaaaacgccgcgcaaattcccggccgatctgctgcatgagaaccggatcaatttgatggtttaaaaaagaatccactttcagcacttgatcagaaagaacgattccgtcttctgctatttttcgttttaatgcttccacaatgattacccccgcttataaaaaataaaaaaagcattgcccgctctccaaaaaaagagcaagcaatgccgaatgatctacacgtaacggccgaataaagccgttccattgctcactcatagtcggacatttacggtgaccggtagaaacttgcgtgccatatccacgcgattatatgagtgttcgtatgatattaatcaaattataacaagatacacttcttttgcatagtgaaatttgaatatttccgaacttttacaaagaattagttttcgattattcgtctttttagaatttttagaaaaacacccggtgtatgccgggcgtttcgtttataaatataaatttgaatatttgccgacgagatactcaatgagatattgaacgtttaattcttctcccgttgcatcttttatgatgtcaagcggcattttgcgtcttccgtgctgatgaaccttttctgtcagccattgtttgatcggctcaaagtcgccccgttctattaattgatcaaattcaggcagatcctcaagcatggtatgcttcagctgtgccgcatacatatatccgagcgcataggaagggaaatagccgaaatcgccgcccgcccaatgtacgtcctgcaaaatgccttttgcgtcagatggcggcgtaatgcctaaataatcatgatatttttgattccacaatgcaggcagttcttccactgtcacttcattgctgaaaatcgctttttcaatttcataacggataataatatgaagcggatatgtcagctcatcggcttcaattcggataaaggtcggtttcgcctcatttacggcgcgtacaaagtcctctcttttcacatcttgaaattgatcaggcgaagcctcaaccattttttcataataggcggtccagaaatgttgatttctggcgataaagttttcataaaataacgattgggattcatgaattcccatggatgcaccgtcagataagttcgttccgctcagcgcttcgtcaatattctgctcgtagatcgcatgcccgcattcatgaatcgttccgaaaatcgccgtgcggaaatcgttttcgtcatatctggtcgtcacccgcacatcgccgcggttgattgtcgtcgcaaacggatgcaccgtctcgtccaggcggccgccgtcaaaatcatacccgaactcttttaagaaatacaaggagaggtctctttgttgttctttcggaaacgttttcgttataaaggaagtgtccggtttattgccggattccgtcacttttttgataagcggaatgatcgcttccttcaattcagaaaacagctgatccagcacctttaccgtaacacccggttcgaaaatatcgagcaatgcgttgtatggatgatcttcatagccccagtaagaaataaaccgcttattaaaatcaatcagcttctcaaggtacggagcaaacatagagaaatcagaggccgcctttgcatcctcccaagccgtttccgctttcgatgttaaaatgacatattctttatactcatcttcaggaatttttttattatgatcataatcttttttcgcaagttccgccgctttcactgtatcttcagagagctcttctgcatgcacgagaaggatgtcgatcagctctttcatccggtcggatgtctggatttgaaaaacgtcagccgacagctgtccgatgctttccgcccggtcatcagagccttttttcggggctcccgttcttaagtcccaatgcatgagcgcaatagcttcttcatagtgggatactctttttaacagattaaaaaactctttttcatatgtatgtacatccatatccgttcccctcccttttcactatcaattacaggctaatggaacgccgttataaagtcaacttcccggattaaaaaaagccgcaggataagattcctgcagctcttgtttttatacgattttcggtgtaacaggcaagacctttttgacttcggccaggacccgttcactttctccgcccgcataaatggatatggttccgctgtcctgattagaacggatgaggcggccgattccctgccggactctcaaaagcatgtacggcagatcaacttcctcaaacggatcttttttcgctccgttccgctttgcggtaaacacaggatcatgaggcggatacggcaatgcccaaatggtcacattccggagcgagtcaccgggaatgtcaagaccttcccataagtggacggaacaaagcacggattcttcatcccgctggaatttttcgaccagactgctgatctcttcgtcaccttcgtagtaaatcggatacggcagctcccacgcggcagcctgttctttaaattccttcatgtcttcaaaggaagggaaaagaacgagggtgcgtccttcattctccttaatggtttcaatcgtttcgactgttttctgctcagacgtcatgtcaccgtgaagcgcaacagacatttgctcctcgtaatcgtacggagattcaacggtaaatgataaaggatcacggattccgagactgtcagcgatataatcaaatgaaccgccctcagaaagagtggccgatgagaagatataaggtatctttttagaaaagaccttttctcccaaaacttcggctacagttctcggcataacgacaaacgttgagtctgtatcccgcgtttcaagccagctgatggcatccttttgatacagcgacagcgaatatgccatttgttcgacgtattcttctacaactgacagctcgtacttatcaatcgtatacatttccgattcaaatacgagcgcctcgccgattttatcgagcagacggcacagttcgtcagccgcacgcttaacacgctggtcgttttggatgtccaatcggtgagagccggcgatttccttcgattcctctgacagcacatagaaaaactcatcgtttgcggcaagggcatcttcaatcagttcggcgaattcctctctgatgtcattttgaagcagacgctctaaaaacagctcaagcgtcgactgcttcacacgatacgttaacgctttttgcgcggcgaattccagcagatgtccttcatcaaacacgacggcgctgtgatccggcaaaagcggcagctgcccttcccttttgcgtgattcttccgtccatacatgctccatgtagaaatcatgggagcaaacaatcagatccgttgattttctgtaatgatctcttgaaagtgttaaaccgcatctatgtctcatatcacatgttaaacaatcttggaaggaatcatagctgacgcctgcccactcttcatttgtcaaatcagcgtactgtttgcggtcgccgtacggataaaagcgctgcatcgcttgtgattcgtgtacgaatgaaggcagcgactcataaagatccagccacttttcatcatcagaacgctgcatcgttttctccagctttttcagacagagatactgctcatgggatttggacagccgtgtatcaatctgcagatccaaatgttctgtcagcttggaaatgtcgccttcttttttgacaagctgttcaattaacgtttcatcggcgcatgcgataatggccggtttacccgtatatcttgcatagctgatggcaaacagcagatacaccagcgttttccccgtaccgactcctgcctcagcgaacatgacctttttctctttaaatgcccgttcaagctgaaacgccataaatacctgctcatcccgaaggtcaaagcctttctcgggaaggatatcgtaaaacacgtcaccaatccaattgttcaattcttcgtaaaaattcttttcttttgttaaagcaaaaggcaaacgtgatgttgtcacccaactccaacccctaactattcggcattcagaccatctataatatcatttaacccttttcaatacaacaaaaaaacttggcctcgccaagtttttgtcattatcatttccggttaatgatatgtgtacataggaacggatggtctgttgaatgtgtatgttttaccgcattttcaagttcttcctgtgcgtgtgtcatgacggaaggaccgaacttagctccggcttcctccagccggaaagcagttgcgtctaacgccttttgtattttactgaagtgctcgctgttcagcataaaataagatcacctctcaaatagaaataatcatcattctatgccgatgcttcactttctatacatgccatcctgaatgatccgcacctgacctgcacaaactacaacagatattcgatcgaatatccatcttcacaaaattattctatccgggagtgatggttacatgagttataaagatcgattagatcagcattctgaattgtttcatcacaattggacgcggccgaaacgctctaaatcgcaggtgaacggccacaccgaaatgtcccagaccaacattattttacggagcaacgcaaaagcgcaccgctggtaatggcagaataaaacgtaaagatgccggagaagacgctgtatcaggcgtcttctctttgttgcggctttttccgctgcggccgcactttagcccagtactgataataatccgttttgataaaaccgttaaagagcttccgtttttttgttgcttttcttccgtagacctcttcaaattgttcatttgacgttaacatgtagacagaccatgtatcaagagattcaaatgcccggcccatttctttatacatctgctcgacttgctttttttcgccgagccgttcgccgtacggagggtttccgacgataacgccgaattcgagtttcgtcgtaaaatcctgcactcgcatctgcttgcattcgatcaggtccccaagtcccgcttcttctgcgttttctttggcgatgtttaccatccggtgatccacgtcactggcaaaaatctgcagcggctgatcatagttcgccttttcttccacttcaaggcgcgccttgtcccacagttcttttccgatccattcccagtcttctgaagcaaaatcacggttaaaacccggagcaatgttttgcccgattaaagcggcttcgatggcgatcgtgccggaaccgcagaacggatcgacgaacggacggtcaggcgtccagttggttaacagaattaacgcggcagcgagcgtctctttaatcggagctccgccctgatcaaccctgtatccccgtttgtgaaggcctgttcctgatgaatccagtgtaagtacggctttatcttttaaaagggaaatctccaccttatactcgggtcccgtttcttcaatccattcattttgttttcctgattgaagtttcagctttcccgctatcgcctttttgacgatccgctggcagtcaggcacactggcaagcactgatttcacggactttccgataacggggaactttgcgttttctggaatgtacgcgcgccagtcaatcgcttttgttttttcaaacagctcatcaaacgtttttgcctgaaactcggcgacctgtactttgatgcggtcagccgtccgcagccataagttagcgcggcagatcgcaagcgcatctccttcaaaaatgacttttccgttgtctactttgcattcataacctaaatcacgcacttctttggcgacgatcgcttcaattcccatcggcgccgtcgctattagtgtgtacttcttcatcgtatcaccctgtctcttttaagctttcgtttcattcaagataaaagctcccctttaaaggagagctctaatttgtcatatcaataatgtttaacgttctgtaagccatgttttgttccgtcgtactgcaatcggctcatcacctcgtactcaggcggcaatcatctatctacagaaagtattctgtccttctatctgttcagttccttcaagaaggttcccctaccaaaatttgggtttctcgctcgaggggtttaccgcgttccactctcaacatttctgatgagacttcgtcactgtggcactttcaaggatactcagccatatccggagacgtaggcttttttcctgccgtcagcctatcaaggctgccctagcttatttcttcgctaggcacgaacactacgggcatctcagcaccgtgcgagcatggactttcctctacagattcaaagacctgcagcgattacccgaacgttaagaacacttgttcattataaagcaacttgtctcatttgacaagtgcatctgccttattcgtcataaagtttgctgccgaatacatgtttctcaaggttggacagccttttcagaatatcaaagttggtcgtattggactgcaccggctgttttttgctagcttcttcaagctgttttttcagctgcagattttcctgctgcagttcttcaatttcttgatgaaaggtttcataatccttaataatcatatctaaaaatttgtcaacgtcttcttgtctgtaacctctaacgcctgttttaaattctttttccaaaatgtctttcgcagaaagctttactttatcagcaagcatctttttcacctcatatcgtgaatcatcatgttatattttattcagaaacacgtcccgttgtcaaatattctctgacgtgttatgtaaagaaatcttcttcctcaacggcggcacggagatcatccatcgtaatcgaataaatcggatatccgtctgtttcacggcgtttttctgcctgctgcagcatatatttcggcgatccttccacctccggatcatataaaagcaaaagcgcatctgacttttcaataaagaacgcgtttttctgccggaattggagcggactttcgtacggccgatgcgtcaggctctcctcataatctgcctgagcaagcaccgcttcatacatttctttattcggctccttccacttttcctcctggccgtagaaaggcgtgataacggcaacctttaattccggatactcttctctgagatcgtacgccgtttctgccgcccaaagctcagtccccagctgtccggatatgagaatccattccaagccttcgtcaataaagcttctgagtctggtttctatcgccttttttatataaacaagcgcccggtcatcctgtttaaagataccgagctcaaacggcttgtaccccgttacggctaatactttcaattaatcacctgcttaaaaaatggggctccccatcgggccccattttgatttgctgatatcctaaccgatcttgcttaagcgttcaatactaatgatcgcagcaagggcttccgcactgaaaatgctggtgagttgtcgggtcaacatttgaaaaagtgtgcggatagtaatgaacgtgctcaaagttgtggtgatttacgttagttgtatgttgcggatgaatatgcggcacaaccgtgttagaaaagcaatggtgttcacagcaatgagtcggatggacaatcggcggcatcacgtttggtctgcaacaatgatgatgaaacatgctaaatcccctctccattaacttttattacactgttaggttatgaagaaaagagggtgcatgttctaattcaatcacccaatttaaaagtgtgtcagcaaactgtctttaaaattcgaaaatacaaacgcaatcaaaaaaaccacgacaaagaacaagtaaaaaacacctttatacataccaactctcccctataaataactaacgctattttacaagatgcggcaccattctacaacaaaatcgatgcggattcagaaaaaaatatttttggcgaaacagctcggcttttgcgctttcccgggcaatatttcaagaggaatatttcctcttgagccgggcaattctcacatggagcttctcggcttctttttccgatatttccccgtcttctgccgcctgctgcgcggcctgcagagcttttttgtaatcttttgcatggtgctcaaaatagatcgccagctcaaccgctgattggtgtctgcatgtgtgaagatcagagtccgtcagtttctcccaaaggggcacggcgtcttgcctgcggttttgttttttataaagcatcgctaagtcaaaaagggcccgatccgaatcttcaaagtctttgccttgcagcgcttccagctgcaaaacggcgcgatcggtttctttatgagcgataaaccatttcgccatggcgtatgcttcctgacgttctgacgtctgatcagaagatgcaaaaatcttttttgacatatggatgtaaagagcgatgagggaaagcacatcttgttcattatgcgagagcactccctttaaaagagccgggtcctccgcctttaaaaattgaaaatacagcatcggcgccaaataaccaggggtgtcttcgtcccttttaaaagcaagctcttcattttcaaccgccgaaagcgatacacgctctaatttatgtttccaaagccgtctcgccccgtgcagaagatcaaagtgcccgaagtcaggaagtttcggaagcctgtcccgcagcaatgtatgcctggtttttacctgcggccagtcaaaggcttttccgttatacgtaacaagggacgtaatgtcaacctcacttaaaaagcttttgtaaagagctgtctcgtttcccggtttagggagcagatgctgtttaaccgcgacacggtcttcatacactcttgcatggccgagcaaaaagatcatattgcctgccccgccgccgaggccggtcgtttcagtatcaaagaagaacagctggcttttttcgtatccttctgctgataaagtatgtgtcaaaccgcctttattccataatgccatgacgtcatcaagttcactgaagctgtaccgtccgtggcggtgcgaaagcggatagacggtttcgcggataagacagtattcatcctcaaaaaagaaaggcttcactccgaatgcctcccattcttctctaaacgggacttgaatatccgggaccgaaagttgtgaagctgccggctttttttcagcttccggcacattcaggtggtttttcatccgctttaatttatttttcaaggacatctttcgtcccccttttcttttacacgtaattcaagagccggagtatcgctttctttgcatctattccttctatttcggagccgatgcaggaaggacacccgtcttgacatggacattgtcggatcaggcgctcagccccttcattgatttcatcaaatcgtttatatacttcatcggcaagtccgattccgcccggataatgatcatacagaaagattgtcggaagtcccgtatgtgcggctttgatttgcggcacgacatgcacgtcatttcgatcgcacatgacgtatacaggcacgatatgctgcaggacgtgggcaatgcctaaaagcagctgttcaagcgttttttcgccgatttccgaatccgtttcttttaattcaagccagactgcactggtatgcagttcttcttcaggaagatgaatcggtcctgatcctatattttcaaatgtcgtcattttaatttttttaaatattgtcggaagtgcgttcacggtgacgtcgccgaaatgtaaggccgttttctttctgctgtccgttctgtcaatgtccagcactttcagctgcaccgctaaattggcatctgtataatattcgacatcgacctttcgcacgtacgcttttttatgttcccaatcaagcttttcaacctgatactgcaccccttcatgaagataaatcgcttcatcatgaagaagcgtcatcgcgctgaagcggtccatttctccgatgatttttacatcagccgtctctgaccggtcaacgatgaccacgttttcctgtgacgccgaacggagactgatattggaggcgggaaaagattcgctcgcccagtgatagcgttcgcggttttcgtgaagcaccccttcttcctctaaatactcgagaatgtccctcgcatcattttctccgaatgtttcatcggctctgaaaggcagctcatatgcggcgcatttcaggtggtcgaccaatataatgagattatcgggattaatccttgcagattcaggcgagcgtttaaagaaataatcaggatggcgcacaatatattggtcaatcggatcagagttcgccaccatcacgataagcgcctctccctgccgccgtccggcccggcccgcctgctgccatgcgctcgcgacactgcccgggtaccccgtcatcacgcagacctgaagctggccgatatcaacgccgagctccagtgcgtttgtgctgacaacgccgagaatgctgccgtctcttaacccccgctctatttctcttctttctttcggtagatatccgccgcgatagcctctgacagacttcgcgccgatttctttttttacgatctcctgaatgtggcttaaaataatttcgacccggacacggcttctggcaaaaacaatcgtctggatcttattttttaaaaaagttttggcaagttcgttcacttccacggtggcgctttttcgaatatgcagcggtttatttacaatcggaggattgtaaaaagcaaagtgctttcttcctgccggggcaccgttgtcgtcaatcaggcgcacagattttcccgtcagctgctccgccaactccctcggattggcgattgtggcggatgtacagataaatgacggcttgcttccgtaaaaagcgcagattctcattaaacggcggatgacgttcgccacatggctgccgaatacaccgcggtacgtatgtaattcatcaatgacgatatatttcaggttttcaaacagactcacccattttgtatgatggggaagaatggctgaatgaagcatatcgggatttgtgatcacaatatgcccggcctttctgactttctgcctgatagccggagacgtatctccgtcataggtgaagcttttaatatccatgcccgtctcgtctatgatttcattcagctcgcttttttgatcctgcgcgagcgcctttgtcggaaataaataaagtgcgcggcttgtggcatcttccgcgatagactgaagaaccggaagattatagcacagtgtttttccggaggccgtcggtgtgacggccacaatgctttctccgttttgaaccgtctgaaaagcggagtattgatgtgtaaaaagccgctcgatccccctcttttcgagagccgcccgaatgttcggatctacttgctccggcatcggcatcgttttcgcctcccgcggttcctcttcatgccaatgcacaatattttcatgattttttaattcctgaatcagttcgctcagtgattttttcttcatcgttcacacctctttatgaggtacagtttaccgaatatttgtttgcctggctagatgaaaatcctgcacaagaaaaaaagcagggaatcagcccctgcctacttcatttttatcgtaaaaagctctgtttgtccttttttcgcttcatttgcgcctgcaaattgcaaaggttctgcggcatcgccattcataatcaccatagggatgacggtgctgcttgctttttcttttattaaatccagccggcacgttaaaagcagatcgcctgttttcactttgtctccttcttttacatgcgcttcaaagccttcgccgttcatattgacggtatccaaaccgacatgtatcaaaagttccgctccggaaagggtgcggatgccgacagcgtgttttgtatggaacagctgaatcacttctccctcaaccggtgaaacaatttctccgtttgcaggctcgacggcgatcccgtcccccatcattttttgtgaaaatacaggatccggcactgaagccaaatccatcaccgctccgtcagccggagaaaaaatcacttcctcggccggctttttccggctgtctcccaatccgaataattttttcagcaatgtgttgtgctccccttcctaaatgtgaatccgttaccagtttattctccactatttaaccatactttcttttttccttcaattcttaaccatacggcatagcatcgcatagtctgtttgtaaaaaggcggtggtcatatggatcaatcccaaaacgataaacttgatccgcaaagtaatgaggacatcatcagccatgcgatggaccaattttttcactcaggtcccttcgcagaattgatgcagggttttcagcaccttgtcaattcggcttttactgaagcgcaagtgacgattgacgtcagagaagagccgacggggctcgcggttgatatcggcgttcccgagacgttccgtgacggggatatgctggtggaaacgaaagggtgctaccttcacgttacaatccgctacgatcataaacaggctcaatcatcccatgtgtcttcaagcatgacaagaaccgttgtcctcccgtataaggtaagtgaagaagatatggaaacatcctggaatgaacagacgcttaccttctttttccctaaaaaataagcatgaatgatggatatcattcatgctttttatttgaagatactggtgaagcctttcaccagcgatccgacctgatttacggcgcttaccatctgccccgttgtatccatcattttattaaagtcaaactgtccgttcgtttttttaaactgggagagtatgcctgagaattgggaagactgctgctgattcggtctgggaacggggtaaggattcacaaaccccggctggcccccgggcatgcctgcctgaggaggagcaggagcaaacggctgctgtatatgaccgtattcctgattcggataaaattgctgcgggtactgcccttgctgatgatatggcggctgttgcaatggctgtatctgctgcggatacggcggctgtaatggctgtatctgctgcgggtagaaatatcccgccggctgctggtacatattttgatatggctgcgctctccattgcatatgacattccccccttgtctctcactaagtttctgctatatatgtatgaattccgccttggttatgtgctttcggtgattctgctctttgtcaaatgctgtcgaaagtcttaattttttaaaaacagaaaaaagtcgaatcgttatgttaacataatctcaacatacatgagaggggatgcaccattatgaacgtatcatacttaagaaagcgttttgctgaagtgaaaaaatatgaaacagattgtgcagataaactgatggactttgcaaaattcctctatattcaaggccatctcaccgcaaccgaatttcgaaacagtatgaaggttctcgaagcaagtggagcagaaaacccggcgtatgaataacatacccgacccctttatataaaagaaggcagccgttttcagctgccttctttttcaatttcatcccttaatatacgaagcgtatataaaacagattcagttaaatccctgtatctttttttatgaatatgatgaacatatgattggagcatcagctccccgaaattttctgtaacggcctgaatttgtgcatgatgaacgtatttcggacggttttcctgaataaacgcaagcgctgcttctgtccaaagcgcgcaaagccggtctcttttttcaacatcgggtttaatcgtctcaaaaaaatcatatgaacggcctgactcttttccatcctgataccttttttcggcttccagaaccgcctctatcatttgttctgtcagctccaataacgactgtgtctgcaaacggactcacctcagtacatatggtaccaaagtttttgcacaaaatcagcttatccggcagactcgcggcaaatcctttttacgccggtcagtcaaaaacaggtcatcaatacaaacatgaagctcccgcgcctcttcctcaagacgggaaagtttctcctgtctgatttcttcagcttccgcctgacagcatctgactgcttgggtaagcgttttttcagcagcagaaatccggatttcgatatcagaaagcagacggagaatatcagccttgctcgtgtaaacagacattcatgttcctcccttttatcacttgcatctctttcaaatataattctcgttttcataccgctctcctctgcacatgacaaaactagaagcagttcggcaaacaaacagagattatcctaaaaggcgtgcctttcgacaaaaaagtgccgcaaactttgtatgaaccggcacgttaatgcaaacgatacagttgaggaggtgccgtatgaaaacgagaccgaaaaatgcaggtaaacagcaaaaaaccgaagcaaaaacgactgatacgcttgataaaaaattaggcggcccaaaccgcccttccacgtaacacatcagcagcccgaaaccccagcgaacggtttcgggctttttcatttcttcagccactctttaaccgcgaagagcgcatggagctcccgtcttttctggaagtaccagtccgtcagttcaagctgtttcggcattttctcctgtaagaaagccccttttcttaaccttttttgaaaccaatccgccctttcgccgtctaatgggtgggcaacaatgggataggttgtcctaagcatcggtgatgttctttttttgatgccgatcattttctccatatcaaagcgtgaaccggtatgaggaacggtatcaagaaaacggtaaaaagaagcgtgaagatcagggctgaacagaaggcgggccagctgttttccgagcgtaattctctcttcggtttttgaaaaccgtttgacggaaattccgtataaatgtccgtcaaatgaagggaatatcaccgtattaaagtgaaaccaatcacttaaataaaaaggaatcgtgccaaaaacattctttttaaacgaaggattttgtataataggtgcttggatagtgttttgttcatttataataagagcatacatgagccgttccgtatctccgtcacgccaaaagcggaaccattcttcctgcataaaagccgagacgcggaaataaggaagatgacggaaaagaggttcgccgatttgttttgaccactggtagaccagaagctgaggataggcatcagaaaaaatcagccaattcgccctttcatacgaaaggaaaaaccagtttttctgactgctgtcaaggccctcctgataaaggacgcctcttaaatcagtcatcgaccagcccgcattgcgggacacaaaggatgccaaaagcggccacttgatctcaggatggcggtcataatatgctttataggcattcgtccgggaaatattatcggcattttttattttcgtctctttttcgatcaggcgaagaatggcggttacggtctgtcgtttatgcacgttcattcacttccgtcactattagtttgataaggaggatggaaaaagtgattcggtacccgaatggaaaaacttttcagccgaacaaaacggtttcatcccaaaacagccagaaacggtctcattcatacagtaatcgcggcatgaccctcgaagacgacctgaatgaaacgaataagtattatctggctaaccaaattgctgtcattcacaaaaagccgacacccgtccagattgtaaacgtccactatccgaaaagaagcgccgcagtcattaaggaagcttattttaaacagtcttcaacaactgactacaacggcatttataaaggacgctacatcgatttcgaggcaaaagaaacaaaaaacaaaacggcatttcccctgcagaattttcatgatcatcagattgagcatatgaagcaggtggtcaggcaagacggcatttgttttgttattatatccgctttcggaaaggtttatttcctcgaagccgacaagctgtttgtcttttgggagagaaaggagaagaacggcagaaaatcaattcgcaaagacgaattagaagatgcttcctttccgatttcccttggatactcaccgagaattgattatattagtattattgaacagctttatttttcgcaggaacagtagactgagcgaaaggttgataaacgaaaggttgagatgttatgtcagatcaatttacgagccgtgaagaacgccgtaaggcaaggcagacgaaaagcactaagccctcttcaccgaaaaaaggcaagaaacagcgtaaaggcggtttattcaaaaagattgtgctgtccttggttattctgtttgtccttggcatagtcggcggagcggcggcatttgccgttttggtttccggcgcgccgtctttggacgaagccaagctgaaaacgccttactcttcaacgatttacgataaaaacggaaaagaaatcgcggaagtgggcggtgaaaaacgaacctacgtcccgattaaggatatacccgatgttgtgaaagaagcatttatcgcaactgaagacgcccgtttttataagcaccacggtatagacccgattcgtatcggaggcgctttggtcgccaactttacggatgggttcggttcagagggaggaagcacaatcacccagcaggttgtgaaaaactcgcttttgacccatcagaaaacgattaaacggaaagcacaggaagtgtggctttccctgcagctggagcgccattattctaaagatgaaatcttagaaatgtatttaaacagaatttatttctcaccgcgcgcctacggcgtcggaaaagcggctgaagaattcttcggcgtaaaagacttgagcaagcttacggttgaacaggcggcaacgcttgccggaatgccgcaaagcccgaccggatataacccggttaaaaacccgaaggcttccgaaaaacgacgaaacatcgttctcagcttaatggaaaaacaaggattcatttcaaactctgaataccaaaaagcgaagaaagtgtccatgaaagatgaaggcgtcgtcagccaaaaggaatacgataaaaaggacacaaataaatacagcgcttttgtcgaagaagttatgaaagaaattgagacaaaagaaaagaaagacgtcgatatttcaactgacggactgaaaatttacacgactcttgatacgaaagcacaagattatcttgatcaattgatgaacggcgatacagccggatttaccgaaggcatgcagggcggcgtcacgctccttgatacgacaaacggagaaatccgcgccatcggggcaggacggaacagaactaccgggggattcaattatgcaacacaaggtaaaacccagcccggttcgacgataaaaccgattcttgattacggaccggtcattgaaaataaaaaatggtcgacgtatgaacagattgacgactcagcttatacgtactctgacggcacaccgattcatgattgggacaataaatacagaggccagatatcaatgcgagaggccctcgcagactcacgtaatattcctgctttaaaagcataccaagcagcaggaaaagatcatgccgtcgacttcgcaaacgacttaggattgggattaaacaaagatcaagtatatgaaccctactctatcgggggatttggtgagggtaaccgcggtgtatctactatgaccatggcaggcgcctacagtgcgttcggaaataacggaacgtacaacgaaccgcacgcggtcacatcgattgaatttaatgacggcactaagcttgatttaacaccgaaaccgaaaagtgctatgagcgactacacagcgtttatgattacagatatgctcaaatcagctgtcgaatcaggaacaggtaaactggctcaggtggcgaacgtggaagtcgccggtaaaacgggtacgaccaactttactaaagaggacattcaaaaatataacattgctccaggcggagtcccagactcatggtttgtcggatacacccctcaatatacagcggcggtttggaccggagttgagtctggcaacaaagcaggcaagaaatcactgtcttctgcagaccagcaagtcgcaaaacggattttccaaaagctgatctcatacgttgatgacggtaaaggaagcttcaagcagcctgacagcgttgtaaaagaaacagttgagaaaggctcgaatcctgccgctttagccggaccgaatacgccggatgataaaaaagtgacggagtacttcgtgaaaggaacgcagccaactgccgtttctaaaacgtacacgaaagaaaaagccgataaaccgacaggattgcaagtgaaatacgacaaagataaaaaatcattaaccttaagctgggattatgacggtgatgcaacattcaatgtcaaacaatccgttgacggcggaagctacagtgacattcaaaacagttcggcaaaagaagccgtcgtctcaaatgtcacgccaggctccacatacagcttccaggtgacagcggaaaacgatgacggaaaaagcgatacggcatcagcatctttcaaagtcccgaaagatgaagaagacgatgcggataaagataaagcgactgacgatgaacagaagactgatgaagataaagataaggacaagacgcaaaccgatgattcaaacaaagatgacgatcagacagatacgtctgacggatcggatcaaacaccaactgatgacccggataaaaatcaggatcaatccgataaggatcaaacagataacaacaatcagaatcagcccggcaacgggaccgataacaacggacagcaagataacggctctgataatgattccgattccggttcagacggctcaaataaacctgacagcggtcaaacggataaaaaccaagactcatcttcaactatcaacgggcagtccaattcgtcaaccatccagtcaaatcccgctcattagcggacgaaatccttcaccccaaacaggtgaaggatttttttcgtacaaaaaacctccttatgggaaaaggaggtttttaacatttgttcatggcttcatatttatgatattgtttcttcatctccgtcatcaattcatccagctgaataaacgagtgatattgagtcggttttgttaaaataaacgccattcgctccgcccaattgatcggttccgcgggaaaatgctttgtttcaagcacagtccagtcgagtgatgtgacccgctcccctgccgtccaatgaaaagcggcaatcagacaggctattcccttcagcatgtcattttgatcacacctcgattttcttgtttgaaaaacgggaagcagcgtttctttcgtttcattccaaatctgaaaaagaaacgggacatattcgcccctttccctccatggctgcactgttggctggccgctgaaatccatatacagcggatggcggcgcagcgccgctttgatctcgaggctttccaagtccgtaaggctgcgcaggtatgtttcatagcctgccagaatgtcaatcgccgtcaccgtttcaccagcccttttttgtcacgcttctgcccttctctgcatagcggaagcaaaggacattccgcacagcggggagattgcgctttacagtgataccggccgaaaaatattaatctgtgatgcgtaacagaccaatcctctttcggcacttttttcattaatgttttctctacttccaaaacagagtccttccagcggcagatgccgagccgtttagagacccgctccacatgagtgtctactgcgatcgcaggtacgccgaaagcaacagacacgaccacatttgccgttttccgtccgacacccggcagcttcacaagctcatcccggtctttcggcacttctccgccgtactcttcaatgatcattttgctcagcttttgaatatttttggctttattacggtacagaccgattgatttaatatcctgctggagttcttccagcgatacggcaagataatcttcaggccgtttatatttttgaaatagcgtttttgtcactctgttgacgagagcgtccgtacattgcgcggataatgcgactgccacaaccaattcgaaaggatttgaatggacaagttcacattctgcgtgcggaaacatatcgccgattttttcaagacaatattcaatctgctttaaatttaacacgtttctccccttctcatgttattgttccagccaattgtaaaaaggtacctgcctcgtatactctttttgcggatcattctgtttcgtttgaacacgccggaatttttggctgtgcgccttcgcctgctcaaccgttttgaagccattctttttccattcaaataaaatccggtcaatatagcgaaaactgagtttccccgataaaacggcttcttttaaggcgtgtttaatcagaatcgcatcatgctgatcctgatcctgccatatggccagcgtctcgcattcaagcggcgacagcggtcttccgaactcttcttcaaagatggtatacaggcttttttgttctctttctgacgttctttcctgcgtttcattttgagaatgctgcatgtaatcatacagcttcgcccataacggctgcagagaatatttttcaaactttatgccgttatggtcttcacattcttcaataaacagaaaacctttttgaataaacattctcaggcagcttgtacactcttcagcagagatggacatgcctgattgaagttcaaacggcgtcggaaaataagagcccttttccaaatgcattttaatcttcaaaagcaggatcaattcggtttcattcagcccgagctgccggtaatgtgtcagcagcaggttgggaatgcttgaaatgccgagttcctgcatatctataaattgctgttttttcatccttacacctcttactgtaaaaggttatctccgggagctttcccctttacttagaaaaagtctcccttgcaggagacttcgtttttcataactattacggatacagacggttcagaagtctcgggaacggaatcgtttcacgcacgtgaggcgctccgctgatccaagccactgtccgctcaagtccgagaccgaagccggagtgcggaacagaaccgtattgtctgagttcagcataccatttgtaagcatctgaatccagaccgtgttcttttaatctttcttccaataaatccatatcatgaacgcgttctgaaccgccgatgatttccccgtagccttccggagcgattaagtcggcacataacacgacatcgtcacgatctttggcaggctgcatatagaacggttttaatgacgtcgggtaatgagtgataaacaccggtttgtcatagctttctgcgatcgctgtttcatgcggcgcaccgaagtcatctccccactcaatatcgtcaaagcctttttctttcaggaattcaatcgctttatcgtacgtaatgcgcgggaatggcgctttgatttgttcaagcttcgatgtgtctcttcctaatgtgttcagctcgatcttacaatgttccagcacactttgtacgatgtatgcaacataattctcctgaacttcaaggttttcttcaaattcaacaaatgccatttcaggctcaatcatccagaattcgatgagatggcgtttcgttttcgatttttccgctctgaacgtcggtccgaaagagaatacttttccgagcgccattgcagctgcttccatatacagctggccgctttgagacaagaaggcgtcttcatcaaaatatttcgtcgcgaacagctcagtcgtgccttcgggagcgcttcccgtcaaaatcggcggatcaactttcacgaagccttctttgttgaaaaattcataagtcgcacggatgatttcgttacggattttcataatcgcgtgctggcgtttcgaacggagccataaatgtctgtgatccattaagaattccgtaccgtgctctttaggcgtaatcggataatcagtcgcttcgtgaatgacttcaatggatgtaacagcaagctcatagccaagcggtgaacgctcgtcctctttcacaattccttttacataaagtgacgtttcctgcgtcactgatttcgcaatttggaagatgtcttcttctacttcagctttgacgacaactccctgaatgaagccggtaccgtctctcagctgtaaaaatgcgattttaccgcttgagcgtttattagcgacccaagctccaatcgttacttcctcgcctgtgtgtttatacacttggttgattgttgttttcaaactctttccctccagaacaagaaagacattcaggaatctgcctgaatctcttttttcatcactttattatacccgttctactctaacggggtcaatgcaagtgaaaagcggctttaaaagccgctttttcagaatcagctgtgtttttccgtaaagcggcggattctcttgaccgcttcttctaaaagatcgagtgacgttgcgtaagataagcggacgttgtccggtgaaccgaaacccgagcccggcacgatggcgactttttcttcttccagaagcgccttgacgtattcatcgacatctttgaatccgcagttttctgcggccgctttggcgttagggaacaagtaaaacgccccttcaggtttgacacaggtgaatccgggaatctcactgagctgagcgtaaatggtattcagtctgtcctcaaatgcctgtctcatctcttcaagcggctcagccggcccgttataggccgcaatggcgccgtattgagcgatggacgtcggattggatgtgctgtggctcgcaaggctcgtcatcgctttaataatcgtctccgaacccgccgcatagccgatcctccagcccgtcatgctgtgagatttcgaaacgccgttaatgataatcgtctgctctttcaattcatctgaaagctgtgcgattgagacgtgtttttttcctccgtatgtaagcttctcataaatctcgtcagaaacgatcagaatgccatgctccagacacacttttccgagttccgcaagctcttccttcgtatacataacacctgtcgggttgctcggtgaattgataatgagggcttttgttttctcggtgatagcctgcttcagctgctccggtgaaattttaaactgattggattccagcccttctgcatagacgggacgcccccctgccagtttcacctgctcaggatagctgacccagtaaggagtcggtataatcacttcgtccccttcatcgagaatgacctgaaataatgtatacagagcgtgtttcgctccagtgcagacaatgatttctgacggcttatattcaatcccctgatcgtttttgaatttttttgcgatactgtctttcaaggccggcagaccgcctgaaggcgtatatttcgtatagccttcattcatggaacgcaccgcggcatctataatgtgctgaggcgtattaaaatccggttctcctgctccgaggccgatgacatcatggccttccgctttcagctctttcgcttttgcggtaattgcaagtgttgcagacggtgttaatgcggatactctttttgccaatttcaacttgaactccccctaatacgtctcacggtgtgatgtttttgagaatcttgccgcttgtaaagtccacatagctaaagctatactgcccgcttttgttgatataggtcacttcccataacggaacattgttttctctcgccgggtgaacgccattcagcttggaaacaagcccttcgtcccgaacgatcttggcagccttgccgcttgaaatgccgtcactggctttttttgagagaatttttgcttttttgtcggccggaacccatacatacatatcttttccatgtttatccgttccggtaacaacataatatttctgtttgccgacaaaggtctccactttctcagcgtctgtcagattcgttttttctttagcggctgcggcagctgtttcgtggccttcttctttttgagccattgcagatttaaaaatgctggccgaaaataaaagaactgctaaaaaaataataccaaatacggctgtaaatattaatgctttttttctcatctttttcacctatgtgcgataaatggtgaagaccgcttcattttgattttcttcgtcgagcgcaaggccgaacatcaggttgtcccgtttcaaagtccggtttaatgtatcgacgattttatataaatcatctgaatgctccacattaatcgttgacagaatttcaattttgctttccatttttataccctccatcggtcgaacaaattttgttagtcataacgggatgcgcccgcggcataataaaatcacaaggcggcatgaacccgcttttactataaaaacaattcctcatcccacaccacgaaagccgcgtttatgcggcttttattccgtttggctgacataagccccgagttcggcatccgtcagctccaaaagggatgaagtcgggagcgcttcaagaaacagccgtccgtatcccgccgtctttacacgctgatctaaaagaacgatcgttcccttgtctcccgccgtacggagcaggcgcccgatcccctgtctgaacgttaacacggcctcaggcagggaaatcgtctgaaacggatttttcccctgcttcttggcaaattcgcattttgcggcgtgaagcggattatcaggcgccctgaaaggaagtcttgcgatcatgacggttgacaattcatcccccggaaaatcaacgccttcccagaaatgattcgttccgagcaaaatcgaccggcttgccgttttaaaggttttcattaatttaccgggactcccgcctgaaataccttgggcgagaagctgaatgcctgagatctccatactgagtttcagttcctgatacacttttttcagcatatcatgagacgtaaacaggacaaggatcttcggctgttttccctttgacatgatttctgcatacttggcaatatgctcaatgacttcccgctccccgtcatatttaacggatttcatctctttcggaatgatgacgttcatctgatcatcgtaagaaaaaggagacgggatgcttttggtgcgcggataaaaatccgcaagtccgagcctttcaatcataaattgaaaagactgctccaccattaaggtcgctgatgtgagcacaacgctttttttgcgggcgaaaaactggtctgccagcatttcaccgggctccaaaggctgcgcatagatgctgacggcattttttgcgcccttcgcatcaatttcaacccaaacggcttctttctcatcattttcaaacagcagcctgctgaacgtatcgcgatattctttcagccccctgatacactttacatattcgcccgctaaaaaagccgctccgcttttcatctgatcaagcttttgatgtaacagtttctcctgtacggaaaacatgtcaagcagctgatcaagcatcgcacaaagccgctccgctccgtccgttatcatgtgaaaccctttatcctggcttttatgattgagactatagacgagacggttcagatcgtctttaggttttcttcgtttgacaaaagaatgcactgaactgaaaaatgcgtcgctttccgattgaatatgcttcatccactcatcggcgtcaaaaaaactttccgccggcagttcatacgtataaaacagttttctcatccgctttaacagtccgtgttcctttaaggtcccgattcggctgagctttgtgtgcagtccgatgtatgaagctctcttccccaggtgctcgctggcggcgcgttcgaaatgatgcgcttcatcaatgatgaccgttccgcttgcaggcagttttttcgtttcactgctttgatctgaaaacagcaaagcatggtttgtgataatcagatctgcggcctgcgctttttctttagcccgttcataaaacccggcagccgagtccttcccttttttcataaaagaattctcatcgtaagccatgcgctcccacagcaatctgccgcctgatggaagattcagctcagcggcgtcgcccgtttcagtctccgtcagccagacgagaagctgcgctttcgtcaaaaccgcatcatagttgtcatcttcctcatgcagaatatgttcaaacttcggcaggcacagataatgtgatttcccttttaaaatagcagctttgaccggccaaggaaacatacgctccaaaagcggaagatctttagacatgatctgctgctgcaaaagagtagagtacgtgctgataatgacgggagtttgttccgctttggcaaataaaacagccggaacgagataaccgatcgtttttccgatgccgggcgccgcttcaatcagcgcatgctcccgattgcggaaggcgccaagcacttcatccatcatcgtaagctgtcctttccgcttttcatagcgggggatgatgccggacaagatctgttctttttcttcgttccacttttcaaggtcaatggccgcattcaccggacgggaaaccggaatgtgatcgggctctttaattgaaaaagaggcgtatggaatgcagctcttttcttccgccggcctgctttcatgaataaaagaatccaaaagcagcgtcaaatcgctgataaaatgctgtgaaagccttctaagctgctttaacgtcggtaaaggcagatgtttcagtttatgtaaaatgtctaaaaagaccaggcccgtaacctccgcatcgctgtctgcgcggtgagggcggtcatgaacaatattcagctctgcgcacaactcaccgagcttatatccttcaaaccccgggaaaacaatacgcgaaagctcaaccgtatcaagcacttcacaatccggcagctcatagcccgcttcgctcagttcatgccggacaaatccgaggtcgaaatgaatattgtgggcaacaaaatacgcgccgtcaagcagatgaaaaatctcctctgcgaccgcttcaaacggcagttcattttcaaccattccggacgaaattccggtcagctgttcaataaacggcgggatggcctgattcggattgatatattttgaaaaccgctcagttatttgtccattttcaatgacaaccgctgcgatttgaatgattttatcgccctttttcggcgaatttcctgttgtttcgacatctatgacaacgaaccgttgtttgttcattaaaatggacacctcaattcttgcatacgagaaaagtgtaacacgttttgttgagaaatggagcggaaaaacagcttttgcccctaaatcttaaaagaaaacccccatgaagggggctcttttacaaaatcgtgtgtgccggctcctggcccagcatctgctcgattttattctgatcatccagaacggccaccttcggctgatggctttttgcttcctgatcagacatcatttgataagaaataataatgactttatctccttcttggacgagacgggcggcagctccgtttaaacagatgacgccgctcccccgcttaccgggaataatatacgtttcaagtctcgctccgttgttattattcacaatctgaactttttcattagcgagcattccgacggcatctaaaagatcttcatcaatcgtgatgctgccgacatagtttaaattggcttccgtcacggtagcgcggtgcagttttccggccatcatagtgcggtacatattatgatctctcccattcatcaatatcaataatgatattatcaatcagtctggctttagaaaattggacggcgcaggccagaatgaccttgccgtttaatgttttaagcggagtcagctccggataagcgtacagttcggcataatcaatgacgccgcttgtgttttcgatgataccggtgacggtttttataacggtttccggatttctttcaccgtctctgaccagttcggcaccttgctgcaatgctttatagatcatcggcgcttctttgcgttcctgctcagtcagatagacgttgcgagagcttttggcaagtccgtcttcttctctgaccgtgtccactgcaaccaattcgatatccataaagaaatcctcaatcaatccgtccacaaccgctgcctgctgggcatctttcaggccgaagtaggcgcgggtcggtttaacgagattgaaaaacttcgtcagcacagtggccactccgtcaaaatggccgacgcgggagacgccgcacaacacgtcagttctccttttcacttgcacggcaacattttgctcgcccttatacatgtcactcggagacggcgtaaacaaaacatctgctcccgcctgttctgcaagccgggcatcgcgctttaaatctcgcggatatgcttcgtaatcctcgcccggtccgaattgagtcggattgacaaagatgctcatcacgacaatatcgttttctttgtttgctttttcaaccagggtcaggtgtccttcatgaagaaaacccattgtcgggacgaatccgatcgtccggccttctgagcggtattgtgcaattaattctttcagctgttgagtttctgtcagttgtttcatcgcttactttcctccgtataagccttgcagcacagtttggtttatctgaaaggaatgcttttcttccgggaaaacccgttctttcacatcacggacataatcgctgagggccgactcaatcgtgccgtcgattttggcgtattgcttcacgaacttcggtgttctgtccacgccgtggccgacgacgtcatgatagacaaggacttggccgtccgcttttgaaccggctccgattccgatgacgggaatggatacttcttctattattttagcagtcagttcagcaggcacacattcaagcacgagcatcatcgctcccgcctgctcgcatttgatactgtcttcaatgagctttttcgcgctttgctcatcttttccctgcactttatatccgcctaatacgccgacagactgcggtgtgaggcctaaatggctgacgacgggaattccgccgagagtcagcgcgcggatggattcgaaaacgccgtctccgccttccagctttaacgcgtccgcgccgctttcctgaataatggccgcggcgtttttcaatgtatcctcttttgaaaggtggtaagacataaacggcatgtcagttacgataaacgtatttttcgcaccgcgttttaccgcttttgtatggtgaatcatgtccctgaccgttacgccgacggttgaatcgagtccgagcacgaccattccgagcgaatccccgactaaaatcatgtcgactcccgcctgttccgcaagctttgcctgcggataatcgtaagcggtcagcatcacgatcggctctccgttttccttcattttcatgaaatccagttttgttttcattctgtttctcctcctctaaacggtgaggagatgagccgccaattcttcgcaagcaaaaaagccttctgtaaaataagaaggattcccacttgtttaacgttcggcgaatgtcatccctctgtcccagtccttttttggatcaaggcagacttttcgtaatctctgttctgctgatcaggtgcagttcattatgatactgcccataggaagtataccaaattcacgaggcttgtaccaactaagattaattgagctcaatatcggcagaatagatcttctttataccgtctctcgtttccaaaagaagaactccctcatcatcaatgccgagcgatttcccgtaaaacgttccttgcagcgttctcgctctgagctcgttccccagtccgaccgcatagctttcccatagcagcttgatcggtgtaaagccgtggttcaagtaatcctgatagcgtttttcaaaagtcagcagaatctcttgtatcagacccgctctgtcaattttttcaccggcttccatgctcaggctcgtcgcaatgtcctgaagctcgccgggaaaatcggtttcctgctggttcacgttgatgccgatcccgagaataaccgaacggacacggtcctcttccgcctgcagctcagttaaaatcccgacggcttttttgccgtgaatcattaaatcattcggccatttaatggcggcctgtacgcctgtaaaagcctcgatggcctgtacgaccgcaacggcggataacagggtgagctgcggcgttttttgcaaaggaacgtcgggtctcagaatgaggctcatccaaatcccgtttccctcctgtgaatgccatactctggccattcttcctctgcctgccgtttgtttatcggcgactacgagggtcccttccggcgcgccgtcattggcaagttcatgagcggttttttgggtggacggcaggacgtcccggtaatgaagctgtttgcccaaaacctctgttttcagcccgaaacggatttcggattcactgagtttccccggttttttaatgagcctgtacccttttcgtctgaccgcctcaacctcatagccctctttgcggagctcctctatatgtttccaaacggcggttctcgagcagccgagcgcgtcacttattttctgcccggagataaagccgtcacccgcctcagaaaataaatcaattaatcgggttcttaatgttgatcccatgatgcgagccactcctttatgtcatgttttcggttaggaagcttccctgccaataccgcttcttcaatccggcgaagttcttcggccacccatttacccgcgcggcggtttctgagctccatcagatcagcgcctgaaatgtcgaggtctcgaaggcttttgatcggcagctgctcatacaggctctgaacctctttcagcttttgttcatcaatcgtcttatgctgtttcagcatcccgattttaacggctgaaaacagcgcctctcccgctcggtacatcgcttctgcttccagctgcgccggataaacgcttatgatctgcaccgctttttttatgacctttcccggcagtttccattgttttaaaaacgcctcggcacttttcggacaaagaccgagaaacaataacagcgctgcccagcgttcttcgcgtgcatctaaagaagaaaacggaaagccgcttgcttcaagcatttgctgctcataaccggaaaggccgggcagctcttgtatcagacctgtctgcaccatcgtttgaatcgcttcttgtgagaaagcgccctgcatcagcttttcaaactcgacggtctttcgttctactgatacatgtgccaaaagctccctgtcttttatgacggcctctcttgtttctttttctaacagaaagccgagctgactcataaagcggacggctctcatcatccgcagagcgtcttcccgaaaacggtcttcagggttacccaccgtacggatcagcttttgtccgatatcatgtgcgcctccgaaataatcaagcagctctccttcggcagacatcgccatcgcattaatcgttaagtctctccgctttaagtcttctgataaagaagtaatgaaccgcacagcttccgggcgccgatagtccttatattctgattcggcacgaaaagtggtgacttcataggtttcatcttcccacaggacgatgacggtgccgtgctcttttcctacatcgacagtccgcttaaagaggcgctccacctcattcggcgaagcgctggttgcgatgtccacatcacctatttttcgtttcatatagctgtctctgacggctcccccgacaaagtacgcctgatggcccgccttcatcagatgatgaaggatggggagggctttgacaaattcctgttccataagatcactccggtcctgccaattcgtcataaatccgttcatactgactgacgattctttgcgaagaaaaggaggtctccaccattttcagcgcatgatcagtcaatcgtttgctgagctgtttatcttctaaaacggcaagcgctttttcagatgccgcctgaatatcgccgacttccaccagaaaaccgcttacttgatctttaatcacttccgggatgccgccgatatttgttccgatgcacggcacgccgcaggccatcgcctcaaggaggacgagtccgaaactttctttttcagacagaagaagcttaagatcgctgatggaatacagctcttccaccctgtcctgatttccgaggagcagcacttgatcctgcagtccgtatttttcgacaagctgccaagcgacgcacttttccggcccgtcaccgacaagcaggagcttcgcctttgtgttggctgcgatattacggaaaacgcggatgacatctttaacacgttttacttttctgaagttcgaaacatggatgacgaccttttcatccggcaaaataccatgtttctcttttatactctctgtatttttcttaagataaacacgttcatcaataaagttgtagatggtctcaatttttttatccggcttgattaagtcatatgtttctccggcaagcgcggttgataccgccgtcactctgtcggacgcttcgatggcaaaacggattaaatcttttaatgacggatcatatcctaaaacggtgatgtctgtaccgtgaagcgtcgtcacgatcccgatgtcacgcttgagcatctgtttggctagataagcgcataccgcatgcggcagcgcataatgcgcgtgaatgatatcaagattttccctcgcggccacctcggcgattttgctcgccagtgtaaggtcataaggcggatgtttaaataccgcgtattgattgacttccacctcatgaaaatgaatattcggatgatatgtatttaatctgaacgggatgcttgatgtgatgaaatgaacctggtgccctttttccgcaagcagcttgccgagttccgtcgcaataatacccgagcctccgacactcgggtagcatgtaatccctatttttaatggtctcattgtccgcccccaaaaacatcatcattcaaaacgggaagctgttttgaaaagaagccttcagcataccccgtcccggcttctttgccatacagtctttcccgcgcttccaccatttcgatataaccgttggtcagcggtgtgttcactgactgcgccgtaggaataaactggctttgataagcgtgcaggctttcttttttcagatcgatggtttccgttatgtcgattacaaagtccggacggtgaaacccgttgatcatataatagtatacgcgctgagccttatgagccggcagttcctgatgatctctgtatttatgaattcccgccgagaacaccgcttcttcgaccaaagccgccgcattgccgtggtcaggatggcggtctttcggataaggcatgaaaacggttttcggccggcaggctctgatgacactgacaatccggcggatgccgtcctcacttttcaaaagcccgcggtcgggaagcgtaagctggattctctcttttacgccgagaattcgtgccgcctctgccgcttcttcttttcttatccctaccgttccgttagatgatagttcggcctcggtcaaatcgcatatcaccgcggtttttccttgagccgtaaattttgcgatcgtgccgcccataccgatctcgacatcatcactatgggcgccgaacgccagaatatcaacgtgttcagacattcggctctcctccgcgcacaagattgcggaaatcaaatgccccgccgtccagcgtccggacaaggatttccgctgttcccatatttgtggcgagcgggatcgcgtatacgtcacacagccggatcagcgcggagacatccggttcgtgaggctgcgcagttaacggatcgcgcagaaaaatgacgagatccagggcgtttgccgcaatcaatgcgccgatttgctgatctccgccgagcgggccggattgaaaacattcaacggacaatccggtcgcttcctggatttttaagcctgtcgtacccgtcgcgtataactcatgatggctcaatatatctttatatgcggtcgtaaactggaccatatcctgcttttttttatcgtgagcaatcaaagcaattttcatttgatgttctcccccttgccgattcagtcgataatattttcgagtccgtatacaagctggtcgattttcatcacttgctccactgacagcttcactcctgacataaaggaagcccggttataggaatcatggcgcagtttcagcgtctggccgtccatgccgaacatgacttcctggtgggcgataaggcccggcagacgcacgctgtgaaggcggatgccgtttaattcagcaccgcgggcgcccggcagaatttctttttcatcaggatggccctgctgcttttctgtacggacgcttgaaatcatttccgctgttttcagcgccgttccgctcggggcatccagcttttgatcatgatgaagctcaatgatttctacatcttcaaaatagttggcggccatttgtgagaacttcatcatcagcaccgcgcccaatgcaaaattcggagcgatgatggcgccgattcctttttcttcagtcaaggcttgaagctcctctaaatccgcttcagaaaatccggtcgttcccacaacggggcggacgccgtgttcaagagcggctttcgtatgttttttgccgatttcaggcgttgtcaaatcgatcagcacatccggttttgtttcttggaaacatgcgcggatatccgtataaataagagcgtctgaatcagctgacatcacttcccgtaatgtttgctgatcgtatgtatggtcaatggcgccgacaagctcaaaatgaggcgtgcggacggcaagttttacggcctcctggcccattctgcctctcggtccggcaatgacgactttaatggtttcatttgacatggtttctcctactttccttcttcttttctagtccagcggtctttatcacgtgtattaaatttatgcatgacgcggttatgagcttcctccaatgaaatatcaagggagttggcgaggcagatcagaacgaacagcacatcgcccatttcctcttccatgcttttctcattttccgtcgttttcttcggcttttccccataataatggttgacttcccttgcaagttcgcccagttcttccgtgagacgggccatcatggcaagcgggctgaaatagccttctttgaattggccgatatattcatcgacctcagcttgtaagtctttcatcgttttgtcactcactgtgcgaatacctcctgtcatctcttccatgttagctaattcaagtacatttgacaaatgttaaaaacggcagtttgctgttttcttttgtatccactataatatttacgcaatcttatggaaggaaaaggggtttgatgcaatgcttggagaaatcagaatcaaaaacatttgctttattttaatcggcgccgctgttttttcattcggactggttcactttaatatgcagaacaatttggcggaaggcggatttaccggcattacgctgcttttatatgcgttattccacatcagcccttctatttccaacctggtattaaacattcctatctttttcatcggctggcgtatgctcggccggacgatgtttgtctataccctgatcggcaccgtctctctttccgtttttctgagtgtttttcagcgctacgaaattcatatgccgctgtcgcatgatttagcgctggccgccttgttcgccggtgtttttatcggcgcgggtctcggcattatttttaaatacggcggcacgacgggcggggtcgatatcatcgctcggctgatcaacaaatttttcggaatcccgatgggccggacgatgtttgcctttgacgcctgtgtcattctgctttctttgtttacgtatctttcttacaaggaagcgatgtacacgcttgtagccgtttttgtcgctgcgagattgattgattttatacaggaaggcggctatgccgcaaaaggggcaacgattatttcttcgaaaaacgatttgatccagcaaaaaatcattgaagagatggagcgcggcgtcaccgttttaaaaggacagggatcatatacaaaagaagacagggacgttctttactgcgtcgttccgaaaaacgaaattgtgcttttgaaaagcgtcatcacttccgttgacccgcacgcctttgttgcagtaagcgacgtccatgatgtgctcggcgaaggatttacgcttgatgaaaataaaaatccgatcagacgataataaaaaggcggcttttgccgcctttactgttcgtgtttccatttgacaaccggtgattttttctttttcaatcggcgggcgaatgccggactgacattgagcgtctgctcgacgaagcgctgcggcgtcagtgccagccattggtttaaggagacgtcttcgaaacggtcgcttttgaagatttccagaaagcgaagcacggtgtcaccggtattctgaacataatgtcccattgcaacaggaacatatcctacgtcacccgcttgatagttaaatgtccgcgctcttccctccgccgcaaacaccgtcattttcgcttctcctgaaaggtaatactgccactcgtccgtattcgggtgccaatgcaattctctcatgcctccgggttcgacctccacaagagctgcagcaatcgtttttgacaccttaaacgtttttgaatcgacaatctttactcttcccccgctggtaacaagaggctcctgccgggaaagcttgtagctgaacggctctaaaacggggccttccggggaagagactgctgcccgctcaattgggggcggcggttccaactggaacatataacgctctttcttgtgaatgtaagccagctcatagcccggaacaccgaagttcgcctccagcacgctgcgcggggtgtgggcaaaccagtccgttactgaaaaggtgctgttttctgaaaaagagccgtcatcaaagacgagcaaaaactcacttccctgctctaatccttgaatggaatgaggaatgccggaaggaaaataccacaggtccccttcacttacgttatcaataaaattccgcccattttgatcgaccgcagttaaacgtactcctccgttaatcacatatccccattcggcttctttatgccaatgaagctcccgcacagctcccggtttcagcctcatgttcaccgccgcgatgtttttggataccggcagttccctgaccgtcacctctctggaccatccgccgtcttcaagcctcatatgcgtatcagaaaatgagaatttcaagttttgaaccgttcctgcatccgttgaaggcggaacgagcatgtcaggattctggaagtcacgcgcgaggtttcgcggtccttcgtcagtcgccccttttctgcctctgatcggctgcgggaggtgttttgaagccaattgctggatgagttttttcactgacttagctcctttacagcaatttgtgtttatttagacttaggatactcacgctttttctctttctttttttccgctctgtattttcggtagccgacatatgtcagcgcagtaataatgataccgcctgttgtcagaatgacccagagcagcgaagggtcagcgtcatcccgctccaccttgtcaaaaacccgctttaaatcctgctgcaggagtgtcagacgctcaagctttgttccttttgtcatctgctgaaacccttcctgctcaatcacctcgatatgtttcgccaccgtatcaagctggccggccgacacatccattgtcaggctgggataaattaaatcatataatgatataaattcattccacttttcattgaaatttccacttccgtttccgctgacatcttcttttaaggcgctgaatgtcgccataatcggtctttcaagcgaaccccacagcggatcggagtggtcttccatcgcatccattaccaacctgaactgggcggctgcccggattttttcggtatctgaggcgtctgcctgtttcaggacgcgcactaaatcattgaagcccagagtcacctgcctgacttcggcgccgctcagtgagtttacgtgtgtcatttttttcttaaagtagccaagcacttgcagagcctcatcatactgcgaatgccgcgtcatttggaaaacggtatccgaaaggtcgttcagttccttgagaccgccctcatcttcagctttggcagttgtgatgaaacacataagagcaagtaaaagacagatcgtcagctttcgtttcatagaggtccctcccactccttctctttacagaatatgaggagcgggacaaggttagaccaagattctatcagtgtaagtcaagctttatccgtcttttagaaatcaccaaatagtatgcaaggccgagtgaaaatatgctcagccagaatgtagcatagccgatctcttgcatatagtcattgagcattgagtagcggggcatcatgccgaaaagataatcaatgacgtcattatgaagcgtccaaacagcagcaacggcaagatgccataaccggaaccgaaaatacgggctgtataaaacgccttgaacggccatggcaaaatgtgaagcaatcagcatatacccttcccaaggcatctgccccattttgaccagcacaaagacattcattccgaccgcccacagcccgtattttacaagggttacaagagccagcgcttcaaacagcggcgcgtttcttcccatgagaaatgccagaagcacaaacaggaagaaaaacgtcgccgtcgggctgtcaggcacaaatatcagaaatcggaacggcgtgtccgcaagctgcggcacataccaataatagccgtacaccgtaccgataaaattaacggcaagaacaagcagaagcatgccgcgcaaccctaaaagataagaaatccacctcataccatcaactctcagtccgtaaaaagtatgtatcatgcaaaaaaagctgacatccggtcagctcttttcataaagtatatcctgctgttgtctacttcacaatacgttatttcgctgtcgtttcagaaatgaacttcgccagctgatcaagctgtttgtcattccctttaaaaataccggctggcatctgccctttccctttgacggcgatttttttaatttcttccgggctcagcccgttatcgaccagggacggaccggcgcctcccccttgaagattatccccgtgacaggaaatacagccttgttctttaaataccttataaccgtctgattcagtatcaatggcggcttcttttttaattttcccttgctcctccgcctttgcccagtcatgtgtcgcgactgactgccacgttaaaaagaccgtagcgcaaagcgccaaaagcatcatcccgacagcaaccggacgcttccacggccttctttcagaccccctgtcgagaaacggagccaaaagcagcgacccgaaggcaagccccggtataatcatcgctccgataacggtgtagctccctgcggcatattcatattttaaaagctggtataaaaatagaaaataccaatccggcagcggaatataccctgtatccgtaggatccgccacccgttccaaaggcggctcgtgcacaatcgttaaaacgagaaacccgacgaggaaaacggccccgaccatccattctttcagcagaaagttcggccaaaacgcctctgtctttccaggatactctgaatagtctttcggtatattcggttttttttcagccggtatccttgaatctcctacaaacttcattcctttcccccggtgcatgtcatcccctcccttttatatcagatttgtattaaagcggtcctgaaattccctgcttgcggatcataacaaagtgggcgcccatgagcgcaaacaaagcggcagggagaaaaaatacgtgaatcgcaaaaaatctcgtcagcgtttgagcgccgacaatatcgtggtggccggcaagaagagttttcacctgcgctccgatcaatggcgtcgcctcggcaatctgaagacctacctttgtcgcaaacagcgccttcatatcccacggaagcaaataccctgtaaatccgagaccgagcatcacaaaaaagatcagaacaccgacgatccagttcaattcccgaggctttttataagctccctgaaagaaaacccgcagcgtatgtaaaaacatcatcacgatgactaaacttgcgccccaatggtgcataccccttacaatctgcccgaaagcgacttcattctgcaaataatacacagattcccacgcgttttttatatccggcacataatacatcgttaaaaacatcccggagagcacttggataacggttacaaaaaacgtcaaaccgccgaaacaatagacaaaagccgagaaatggtgagcgggatttacatgttccggcacttcatggtcggcgatatcccgccacatcggcgtaatatcgagacgttcatccacccagtcataaattttattcagcatgtcacccttcccccctaggctttgcttttccaagatacaaaaagccgtcctttactttttgctcataacggtcaagaggcgcgagcggcggcgtgcccggaacgttcgtgccgtctttttcatacagcccgtaatggcagggacaaaagaatttgttcggatttttaggatcattgttccagtttacggtgcagcccaaatgcttgcagatcggagaaagcgctataatttcatccccatgcttgtaaacccaggctgacctggattcttccgattcgtaccaggcgtcgacttgatgaattttaaagtcaaaccgcttcggctccttcgtcagctcatccacactgacaacctgcaccattttttgatctcccgtcggttttaataccggatccagcgcaaaacggaccataggcataagcgcactggcggccataaatccccccacgccggtgagcgcatagtttaaaaattgtcttcttgatatatcttgttttccgcccatctcttccccccctaaagattgaccaaaaattaactaaaatagaaaataattctgagatttgacaccctcataatatatgaatctttcagcaaggtcaacagaggcaaaacgggtgttttgcaggatgcctggagtttttaagaattgttccacttctgtaacaaaacgttcaaaatttctccgcacttgtcatccgcaatttttctctttaaagagtctttcatatgttcaaacggaacggcaggtatgtatatgacatcagaccctatttcagaatccttccatttttcgtctgccgtcaggaacaaggcgtgcctgaagttggtcatcacctcttctttgagtttttgaagcagggcgatttgtgattggtctatatcaacatatgtataagaggggaataaatatacccgtcccttcaattggcgctcaagctcttcagaaagcaattgggtgctttccccctgttcaacggcctcttttaagcctcctgaagacgttatggaaattaacggaatgacagcggtatcaatgtaatccgcagattgtaaataggcatcggcatcagcggccctccatctcatgtctcgttcctcctctttacgcaacaagccttgcatattctgcaaggctgtcatttatgtgagctgattcaattggcgggaaagcttttcaaatgtttctttgtcgtggcggtccagcgcctcgtcgatatctttaagcagcttttcccgctggaaagtggaaatggcatgttctaatattttttcagccatcccctgatcctgtttattttcaaacaggtctttcggcagatgcggatttgattcaagaacagcggcatattccggtgagctgtaggccgaacggaaattcagctggataaataaatcctgctgtttatttaaccggatgtcgtgaaaagatttttccgcgtccgtagtcatgacattttctttgtaaaacctaaacggcacctcatcaacgcaatgagtagacatgataatgcctctcgggcaaaattcggcttgttctacaaaatggactttttccattaatgaatcatgactcattaaataatttaaaatccagacgcactcccggcgtttaagctgataatgatttaaaaaccaacggataaaatcctttttttcattgacagaaacaggggtctgcatgtaattccctcctctatcgatcgtataatctgacatcacttatacattcagcaagcatggtccaaaatcctgcttatcttaaaaattcatcctctatccgtaagattgtttcttcaagctcttcgtttgttccatccattgaaagcacttgttttaaaagcggcagcgcttctttctggagaccctcttccaataagaagtgagcgtattcatataagaaatcccgatcatcctgataatggagatacgcagcttcgaagctttttttcgcttcagcgtattgctccaggcctgtataggcccccgccaaataccaattgtatttcggatcttcttctccgtagccgcggacttcctgaatcagatcaataatctcttcaaagctttcttctttatgatagacggctaaaagcgtatggagcgcttccacgtaacccggatcgagcgccagcgcttcctgaagaagctttttgccttcctcttcgctgccgagctttaacgccattttcgccgcatagagaaaaagctctttattgtattcatcgtaagtaataccttctttagcggtttttaatgcatcttcatacatgccttctgcctcgtagctttttgcaagcggcatataaagcgatgaataggaaggatcaagcccttttaaatcagacagctgcttgatggctgttttgaccattcccgcctgataggctgtgaacccgtacccgaaaatcgtattcggttctgtatgttctgccgccgctttttcataccatgaaatcgcttcctcaaattcacccgccgcgctcaatgactcagccagcctctgatgaacgtttacgccgccgatttcgtgccgttcttttgccgtctcttcatagtaaggaacggcttttgcatatgatccctgagtgaagtataattcccccagagcgaaatcaataacaggttcatcttgtaacatcgctttcgcctgtaacagcttttgctcacttacttcaaataagccctgcatctgatacagatcagccattaaaaggaggctttccgcgtaagacgggtcttccggagaaatcgtctccagcacctcaagagctttttcttcttcatcaatatctattaacaattcggcgtaaaaattcgtcagctcagactcacccggatagaggtcatgcagatcactgatcagcgctaacgctttttcggcgtttccccattcatagtagagctgggctgcaatggctttgtcttcgtcatgaagctctgtttcagcttttgaaagcgctttgagtcccttttcggtttcacctgcttcaactaattttatggcttcttgaatcaatgtattcaaatcagaccggtcctttcttttcctatacctcatcaaccaaatgaaaagggtttttattcgggttattcttatcataattcagacagggcctgcccgcaaataagatgcttcacccggcattatagtttatcagaaaatggttaagaggaaaacggcaaaaaaggggacggcatctttatacgcaaacagcgcaatttgttccggctgtttctgtaacgaaaacgcattccccctttcttttagttttctgtttaagacaagctatgtcaaagcccaagattttatgacacatgaagaaaaaagcccgaagaatcgtcttcaggcttttttggctaattgatctaaatgctcaaagaatgtcggatatgagacatggatcgcctctgtatcacggatgtcgatcggctcttctgtcaggcatgaagcgataccgagcatcatgccgatgcggtggtcgccgtggcttgacacatcggctccgcccgcaagcgtttttttgccgtgtattttcatgccgtcttcagtcggttcaatgtctgcgccgattttccggagctctgatacgacggtgtcgatccggttcgtttccttcaccttcagctccgcagcgtctttaatgacagttgtgccttcagcctgcgttgccaaaagggcgataatcgggatctcgtcaattaaacggggaatgatttctccgccgatttctgccgctttcagagctgaggtttcaataaccaggtctccgtaaggctccgcactgtccgcttctgaaggaatcacttcaagtgaagcccccatttgctttaagacatcaatcattcccgtgcgtgtcgggttcaggccgacgtttttcagcacaatccggcttccgggaacgacagcgcctgccgcgaggaaaaaggccgctgaagaaatatcgccgggcacgaaaatatcggctccccgaagcttctgaccgcccgttacggaagcgctcgtctccgtttccgcaagctcggcgccaaaagcgttcagcatccgttccgtatggtctcttgatttatgaggctcagtgacggtcgtcgtcccttcagcctgcaatccggcaagcagcacggcagatttgatctgcgcgcttgcaacaggggagacgtaatctatgcctttcaattgtccgcctcttacggataaaggcgtaaaccctccgtccgctcttccgtcaatcgcggctcccatctgttttaaaggctccgtcaccctcttcatcgggcgctttgcaatactttcgtcacccgctaccgtactgtgaaatgggcgtccggctaaaatgccgagcatcaggcggatggtcgtgccggaatttccgacatcaagaaggctgtcaggctcacaaagtgcgtcaatgccctttccgtatatcgttacatcacttccgttttgttcaatggagacacccatttttctgaagcaggcaatggtgctcagacaatcggctccgggcaaaaagttttttaccgttgtcgttccttccgcaagcgctccgaacataacagaacggtgggagatggatttatcccccggaatatgaatttcaccgtttaaagacgtcactttttctcttttcaatgttttccacctcagtcagcgtaaaatgtgtcatatttggcgcgggattgaatgcaggtttccgcgcgcttccggtcatcatcagtctggaaactgattctgagaattccgttaatatcttctcttgtttcgataatgcggatgttggtgatactgattttttcttctgccagtatcgccgtaatttccgaaatgaccccggatgatcgggaacatcgacataaaggtcataaaaggacgggatcgctcctttttgacggagcggcaggccgtcgcgataatctttcgcttttttaaaatatccgaacaggctgtccgcatcttcattttctacataagattcgatcgtgtcaatctcccgtttccattctttgaagcggtcaagcagtttatctttgttatgaagaagtatgtctctccacatcgccggactgcttgaggcgattctggtgatgtcccgaaaaccgccggctgcgaaacgcttcaaaaacggataattttcttcagaatgatgagcctgatggacgaggcttgcagcaacgatatgagggaaatggctgatgacgctcgttacgccgtcatgctcctcgggagtcatctccacaaagtgggcgtttgccgctttcaaaagctccttcagatgcgttactgactctttagaagttgattttccgggtgttaaaatgtaaaacgcattttcgaataaaaattctttggcggcagcggccccggatttatgagaccccgccatcggatggccgccgacaaattgataatgagccggaagcactttgtcggcgtagctgacgactttctgtttcgtgctgcccacatccgtaatcaggagttcatgggtgatgtctgatgcggccagcatatcgagcattttcagcgtttgggcgacaggcgtggcgataatgacaacagacgcttgctgcgccccttccgtcaatgagccggcccgctcgtcaataattccgagcttcagcgcggcagtgagctgttcttccgaaatatccacaccgataatccgtttatgcggatgctcctttttgatggccaatgcgatcgatccgccgatcagcccgatccccgcaagcaatatagtatccttcatttcactcatttcctttttcaactattttaatagagcaaagaggtgatgcttgatcacctcttataatatttcagctaagattgtgagaatttcctcattctgctctttcgtaccgaccgtaatccttaacgctgtcggaaatccgagcgcctgtcctgaacggacgatatatcctttttccaacagggcttggaacagttcatccgccggacggttaaaatcaatgagcacaaagttggtttgtgaaggataacaagttaatccgtgagtttccgcaaaatcataatactgcttaaggcccgctttatttttctcgacgcattcctgaataaatgtgtggtcgtcaagcgctgccagtgccgaagcctgaccgattctgctcgtattgaacggctctctcgccggttcaatctggcggatcagcgcttcgtccgcaatgccgtatccgacacgcagcgcggcaagtccgtacgctttagagaaggtgcggaggatcatgacattcggatattgctttaaaagcgggatgctttcagggtaatcgtccgccgtaacatactcgtagtacgcttcatcaagtacaacgagtatatgctcgggaactctgtttaaaaaggcaattaactcttgctcagaagtatatgtccccgtcggattattggggttgcatacccatatgactttcgtctcgccgtcaattgcttccagcatccggtctaaatcatgagcgccgtcactgcggagcggcacctcgcgcacctcagcgccttcaatcaccgcattgtgtctgtattgcgggaaagtcggggcggcggtaatcgtgtttgcctgatcatttaataaagaacggcagataatctgcactagctcatcagagccgttgccgaaaatgatcgaagattcactgacctgcagatgctcactgagccgcgttctcaaagcggcactgtaaccgtcgggatacagcgcaagctgctcaatctcctgatgcagcgcatcttttgcggcctgtgaacagccgaacggattttcgttagaagcgagttttactactttttcaagcccgtattccattttcacttcttctattggtttgcccggctgatacggtttcagctgccgcagctgttctttaatctgcaaatccagtcacctcattttacactgtacagtcgtccgaacgtcttcgcgtattcttcaaattcaagaagcgcatcagctcttgtgccgggattcacaagctttgttttaagctcttcaacttttttgacaagcgcgctgccgacaacgacaccgtcagatatttcattcatcccgtcaacctgtttgcggtttgaaatgccaaaaccgaccgccaccggaacagagctgaattctttcaccttacggatgaaagagtatacagacggatcgaattcgctgcgtacgcccgtcactcctaaagaggatacacaatacacaaagccgcaggcctgttcagtaattattttcaaacggtcttcacttgtcggcgcaaccagcgagatataagcgatgttctcctttttgcatgtcatttgcaaaagggcgctttcctctaatggaaggtcgggtacaagcaggccgtctatgtcgttttcccgcagtaaagcgaaaaagtattctttttctaattgtaacacaggattataatacgtaaagaggataattggaatatgaacgccgttttttttcattttgccgccaagttcaatggcttttacgatattcattccgttttccagagcccgttttgaagcccgttgtatgacgggtccgtccgcaagcggatctgtgtaaggaacgccgatttcaagggcagaagcgcctgcattctgtaatgatattgccagttcaacagaaatgtcaggaagcggatcgcccgctgtgataaaagggataaacaatttttcagaatctcgcagattaaacatgtgtctccaccccgttttccaaaacattcatcagcgtatgaacatctttatctcctcttcccgacaaactgacgagaatgattttgtctttatccatgtcctttgccatttcaaacgcttttgccagggcgtgggcagattcaatagccggaagaataccttctgtttcagaaagcagacgtaacgcggcaatcgcttcatcgtctgtcacgctttcgtacgttacacggccgcttttgtgcagataggcgtgctcagggccgatccccgggtaatcaaggcctgctgaaatggaatacggttcgataatctgcccgtattcatcttgtattaaataggtcattgatccgtgaatcaccccgagcgtcccttttgcgatcgttgccgcatgcagcggcgtatcaatcccttttccggccgcctcggcgccgatcagctcaatgtcttcgtctaaaaaggcctgaaatatgcccatcgcattgcttccgccgccgacacatgcaacaaccttgtccgggagcgttccttcaacccggcggagctgttctttcgcttcctcgccgatgattttctgaaattcgcgaacgatatacggatatgggtgcggacccactacagaaccgataagatagaaatgatcttcacaatgctggacccaatacctgattgcctcattcgtcgcatctttcagcgtgccgttgccgcttgtgaccggcaccacttccgcgccgagcagtttcatccggaatacgttcagcgactggcgcgcaacgtcttcttcacccataaaaaccgtacatttaaaaccgaattttgcggcggctgtcgcggcagccacaccgtgctgtcccgcaccggtttcggcgatgattttcgttttgcccatctttttagcaagcagaatctggcctaacgcgttgttaattttatgagagccggtatggtttaaatcttctcttttcagatagattttcgcccctcccaaatactctgacaccctgtctgcgaacgttaatgcagtcggtcttccggagtaatcaaacaatagttttttatattcggcatgaaaaacaggatcattttttaattctgtgaaagccgtttcgatttcctcaaggggccgcatcaatgtttcagggacaaatttgccgccgaattcgccgtatcttccgatttcatttggatatggatacatagtggttcatcctttcttctaaaagccggatcagtgtttgatccttgtgtccgtttttttcaattccgctggcaagatctataccgcacggacgcgttctcagtaagccggtaatcgtttcaggattaacaccgcccgcaataaaacagcgcttgcttgcattttgagcctgctttcggtacaaggggacacgggcccatgaaaacgcgattcccgtcccgcctctcattcctgtcactgaagaatcaatgacatagccgtcgacagcaggtgtaaattgagccatctgacggagcgtcccttccccgtgatggagcgctttccatatttccgagcgcacaagcggacggaggcgaagggcatcctcaggcgattcatcaccgtgaagctggatgacgtcaagtgccagatcagatgcgatttgcgcgatgttttctatcgtttcatttacaaatactccgacatgtttcttgtctgtccggacctgctctttccatttccggacctcatccggcgttactctccgtttgcttgcggcaaaaataaatcccagataatccgcttctgaagctgccgcaagttcataatcacgcttcgatcgtattccgcagtactttaactcaggctttttcatatcgtcactctccgaacagtccgcggatcgccttttgctgcgaatcctctctcattaaggattctccgaccaatacagcctgcgccccgtgcttgttgacgaattgcaggtcagccaaagaaccgatgccgctttcgctgaccagcaggcagccgtccggcacaagctgcgctattttttccgtttgcgaaacagaagtacggaacgtttttaagtcccggttgtttatgccgagaatgtccggctgaaacacttgtaaaatccgttcaagcacagtttcatcatggacttcaacgagaacgtccatgcccttcccgcgggcttccagataaagctcatgaagctttggaggttccagcgcttccccgatcagcaaaatggcatcggcgccgatcctgaacgattcctccacctgaagggaatcaataataaaatcttttctcagcacgggaagagacacggtttgtttaacatctgtcagaaattgatttctcccctgaaaaaaacgggtatccgtgagaaccgaaagggcgtcggctttagccgcttcataatccgccgcaatcgtttccggaacaaaatgctctttaatcaatcctttagacggcgaagcttttttcacttcggcaatcagcccgataaaacggttcgggttcaggagcgcttctttaaaggatctccgttcaatttgacaggtttccggcagcacgatggatttgatttcttcttttttctgcagaatgatttgatcaagcatacatttcttcctctttctgtttcagacgttcgagctgccttttggcatctccgttttgaatggcttctaaggctgttttcgttccttctttcagatcgtttgcaagacctgccgtataaatggccgcgcccgcatttaaggcggtaatatgcagagcggatgacggagctctatttgcaaaaatattctgaatgagaagcgcgctttcttccgatgaactcacttgaatatccttcaatgaaccttctgcaaaaccgaattgttcaggtgaaacggaatattccagacgttcaccgtttttcagctcaatgatatctgtcggtgctgtgatggacagttcatctaatccgtcacgcgccgacacaagcatgacgtgtctgacatcaaattgttccaaagcgcttgccatcaggcgcgctttatcaaatgaatagacgccgatcacctgccgcttcacctgcagcgggttgctgagcgggcccagcagattaaatacggttcggaagccaagctcttttcttgcggcggcgacgtgcttcattgacgaatgaaacagcggcgcaaacaaaaaccccatttgtttcatttcaatgctgcgtttgacgctttctggagtggcttgaatggaaacccccagcttttccagcacatccgcgctgccgcttttagacgaaacggagcgatttccgtgcttggcaactttagctccggcggcagaagctgtaatcgccgctgccgtggatatgttaaacgtagaaatcccgtctccgcctgttccgcacgtatcaacgacatccgccaagccacccgccgtctgtgcccgcgcccgcatcacttttacaaatccggcaagctcctccgccgtttcaccccggtgggctaataccgataaaatcccccgatctcagactgcgacatggccccgttcatcatcatctccatcagcttttcggcttctccggttttcagcgtgcggccattaacgcacgattgcagaaatttgttcatccgtcttctcctccctgccagaaaagatgtcttctgcgatttgaatcgtttttaaaagcgcccccgctttgttacagctctcttcatattcggcttccgggacggaatcagcgactattcccgcgcccgcctgcaccgacgccgtaccgtttttgacactcatggtgcggatggtgatacacgaatcaattgacccgtcaaatccgatataagcgatacatccgccgtaggtttctctggaagtcggttctaattcatttaaaagctgcatcgcgcggattttcggagcgcccgagagtgttcctgccgggaatgccgacatcagcgcatcaaccggatggacgccctgttttaaacggccggttacaacagagatgatgtgcatcacatgtgaaaaagaaacgacctttgtgaattccggaacggctacggaaccgtactccgcaactctgccgatgtcattgcgcgcaagatcgacgagcatataatgttcagctttctctttttcgtcattcatcagctcttttttgaggcgatcgtcctcttcttttccggcgccccttcttctcgttccggcaatcggatgaatttccaggtgtctgtcatccacgcggatcagacgttcaggcgaacttccgacaatgtctctgtcaggcagtttgatatagtacatataaggtgaaggattgacgatgcggagcaccctgtacagctcaaatgaatgtctggataccggaatgtcaaacttttgcgaaagcaccccttgaaaaatgtctccggcttttatatattctttcagtttattgacgccggccataaactcttctttcgtataattagatgtcatatcggcaaaacttggcgtttcaaatgtttctttagaaaaaaacggctctttcatatctttcggttctgtcaaaataccgataagcttacgaagctccgcgcaattttctttaaaaacggcccgcttttcttcctccgtctcccggccgttaagcgccgcatattgaatgaaatgcacttgtttcgtttcgtggtcgtacgcgatgattttccggcagacaaacagcatgcatttttcgaaatctgtttctttcgcgtggctcggcacggtaggctcaatcaaagggatcatgtcatagctcagataaccgacggcccctcccgaaaacgggatatcaagctcgggtgttttaatgcggaagctttcattcatccaatcaagcacggcttttaattctccggcttcaaacagcgtatgcccgtttggatcagcggcagtgaatgtgtgatgactctctttaatcgtgataaaaggatcgaggccgataaaagagtatctcgaccagcttgacgactcatccttgctttctaaaagatacgtaatgtttctgtccagtttttcaaccatctgaatgggtgtgatcgtgtcgaccgtaaaagtctctgcgattggaatggtgcggtgtgtcagactgtcctttaaaaataaagaaacatccgattgtaaattcatgattctcctccttacggtaaggagaatgagatgaagagtgagaggagtcttgcgtataagaaataaacccaaaagaaaggcttcttttgggcagaataaaaacgtgtttatctcagctcagctaaactcattctctgctaccctattctaaactcaactgttcaatatcttacttaccagctctatacacactcttgtgtatttctaagctttgtttatcgtattacatgtcagtattttttgtcaatgataaatccggccttaacacaacggctttttctaaatagacatgcttgatttcatcctgaggcgtatccgtctgaaccgtcatcaggacacggatacacttttgcagagcgccggtgacatccatttcctgcatgcacgtcaccgggacgtactgccacccggaaaggcggcggaccgcttttgccggaaatacggaatggatatcaggcgtggcggataacaggatctgtacaacgtcttccggcttgcatccattttgttcaatgattttttcaagcagctgctgtgttttttctaaaatttcttgttcggtgtcttgttccaccgttgttgctccgcgaatgccgcgtatcatcatgctgtttcctccattcgccatttgttcagcaaattttcgagctcatcttttgaaagcatgcagtcccgcgcttcccctaattcctttaacacgatgaactgtgtcatgcctccgcgcgtttttttatcattcatcatccgggcggagagaaccggcgtttcaatatcttgtctgatacttcccgggtagccgagcccaatcagccattgtgtgagttctttcctgttcatcttgcaacccgcaacctgttcactcacgtaaagggcaaactgcatgccgagggcgaccgcatctccatgagtaatccggccgtagccgtattccgcctcaacggcatggccgagcgtatggccgaaattcagaaaagctcttatgccctcttccttttcgtcctcacgcacgacggccgatttgattgaaattcctttataaatcatttcattcagctcagcgcttgtcagtccttgcaacgtgtcaaacgtgagaagtttttctaaaaaagcatgatcggcgataaacgcgtgtttgatcacttcagccatgcccgatctcagctcttgttccggcagggttttcagaagctccgtatcgtaaatcaccgctttcggctgataaaacgcgccgattaagttctttccgagtttatggttgacggccaccttgccgccgaccgcgctgtcatgggcaagcagtgtcgtcggcatttgaatgaaatcaattcctcgcataaaagtcgctgcgcaaaagccggtcaaatcacccgtcacgccgcctccgaaggcgatcatacatgaggagcggtccatatggaaagcgatcgcttccgtttgaatccgttcatactcttttagagacttcgcttcttctccgcttggaacgattacttttttcacgggccatgtttcgtttaaaagccggaacatctcatcgccgtaaagccggtcaacttcagcatcgatgacgagaaggatctttgtcagcggcctgttcagtgaagacaaaagagcagcggcctgtttccttatgccttcaccgatatacacgggatatgcggaggaagctgtccgaacctcaagctctttcatcagaattccctcgatagttttttcatgttttcaacattttctttaatgcggtcgatctggtcaagcccgaattgttctacgacggcatttgcgatttcccaggccactgcagcttcagccactacacttgctgccggaaccgcgcagctgtctgaacgttcaatgctcgctgtaaatggttctttagtttcaatgtcgacgcttttcagcggcttatacaaagtagggatcggtttcatgacgccgcggacgacaatcggcattcccgtcgtcataccgccttctaatcctccgagcctgtttgtggcgcgtgtatagcctttctcttcatcccatacgatttcatcatgaacttcactgccgtttttgccggccgcttcaaaaccgatgccgaactctacgcctttaaacgcgttaatcgacagaacggctgcagcgagcttgctgtccagcttacggtcatagtggacataacttccgacaccgacaggcataccttcgacgatcacttcaacgattccgccgatcgagtcgccgtttgccttcgcttcatcaatggctgccatcatttgacggcctgcttcttcatcgtagcatctcaccggtgattcttccgttacccgtttgagatcctcaatggatgtgtaatcggttttctctgcttttacgctgccaatttgcaggacgtgtccggcgactttaatgccaagctccgctaaaatctttttagcgacggctccggcagccacgcgaaccgttgtctcacgcgcggaagatcgttctaacacatttctcatatcacggtgattatacttaatagccccgttcaaatctgcgtgtcccggtctcggtcttgaaatctgacgtttcatttcactttcttcttcttctgtaatcggtgcggcgcccatgatttttgtccagtgagtccaatctttattctctacaacgagcgcgatgggtgaaccgagtgtccgggcatgccgcacgccgcttgtgatcttcgccctgtccgtttcaatctgcatgcggcgtccgcggccgtgccctttttgacgtctggcaagctcaaaattaatgtcttcttcagttatataaagccccgcaggcacaccttctataattgtcgtcagctgcgggccgtgtgattctccggctgttaagtatctcatttctttcttctcccttcatcgcattaacgcttttaagtaaaactataccacaagttttcattaaatgtcttctatcttttttgataaaaaaatgtatcagtgctctcaaggccgaatttttccgggctgaaaatctgctctgtgcttccgacaaacagaattccgttctttttcaggctgcccgccatttttacatacagctcttcttttgctttttcagtaaaataaataaagacgttgcggcagacgatcagatcaaaatcctgttcatagctgtcggcgagcagattgtgccgcttaaaccggatgtttttttgaatctcttgttttacttgataactgttgtcagcctgcttggtgaaataacggcttttcacggaagccggcacctcttgcagcgagcgttcctgatagatgccccgcttggctttgccaagcgccttttcatcaatatctgtcgccaatatatcaaatccggccaaacccgcctgctgactgagaatcatagccaaagtatagggttcctcccccgttgaacaggccgcactccatatttttaacggtttgttatgctttattaacggaagaattgaggtttcaagaacttcccaccgtttataatttcggtaaaattcagaaacattgatcgtcatcctgtccaatgtttcatttaataaaagcttgtctttctccaaagcggcggcaaattcctgaaaatctttgaatccctttttttcataaagggacgtcagccgccttttcatctgtgcttctttgtataaagataaatcaacgccggttatttgtttccacttggtgataaaaatttcgtaaggctccattgcttctctcccaatctcgctgtcttttgtcctagtatagcctgttttctttctaatttgtacgatttcaataaaaaaatcagcccgcaggctgatttgtgagaaatgaaaagacagggcagcgcagcctctgtctttcttaaaatatgtaaaccttttcataacaagagaaaaagaaaggctgacggcttagtacacccagtcggccattaatttttgatacggtacaagctcttcccgtttgaagaaaatgtcaatttcccgctcggcgctttctaaggagtctgaaccgtgaatgatatttttgccgacaaacatgccgtagtcaccgcggatcgtgcccggcagtgcatctttcgggttcgtttttccgatcagctgtcttgtgatctctactacattttccccttcccataccattgcaaatacgggtcctgatgtaatgaattccacaagctcgccgaaaaacggcttccctttatgttcagcataatggttttcagccatctgttctgaaacttgcattagcttggctcctgccaattgtaagcccttacgctcaaatctggataaaatctctccgatcagctggcgctgtacgccgtccggttttaccatgataaaagttttttccataagattctccaccccatcattatgtataggctttcaagttgcacaccgaaatcgtaacatctttctgacaattaatcaatccagggcggagaatgttcacatcttgttcgtaaaaggaatttaaaatttccgtttgccgatatatttggcgatggcggccaatgatgagcgcgcccgtcctctcggcagtgtattcagtttttcaaacgctttttttaagtacctgtcactgacggccattgatttttcaattgcgtctgtgcgtttaatattttcaataatgggggcgagctgctcctgtgttgtttcactgttaattaatttcagctgatttttcaattcaggctgacggagcgcgtacaaaacgggcagagtgacatttccttgcagcagatcccctccgaccggctttcccagttcctcttccgttgaagtgaaatcaagaatgtcgtcaataatctggtaggacatgcccacgtaatagccgaaccaatataatgctttgtgaatcttctcatcagctcccgaagcgatggcgccgagctggcagctgacggcaatgagaagagccgttttccgtttgatgcggcgcaaataggttctgaggttttgttccatattgtatttatctctgatctgttcaatttctccgaggcatacttctacgatggttttggacaggatccggtgggctttcggctcatccaatctcgtcatcatctcaagtgagcccgcaagcatataatcaccggtatacatggcgatacggttgtcccacttggctttgatggtcggttttcccctccgcagctcggcgtcatcaatgacgtcgtcatgcacgagggacgccatatgaatcatttccagcgtcaccgcaacatattttattttattaatgtcatagtcgccgaacatgccggaaagcaatacgaaaacagggcggatccgcttgcctcccgcctggagcagatggagcccggcttcactcagcaagggatagtctgaccgcaccgtttgctcaagttccctttcgatcacatcaatatcgtcatttaaaaaagaataggccattttaaatttcatatcattcacccaaacatctgtatattcatcatttccaaccgatatgcgtagcggccactccgccggtaaacgaatggtatttgacattcgtcaggcccgcttcttcaaacagacgcgcaagctctttcataccgggaaattctcttgccgattcttgaagccaagaatattctttatagctcttcgcaaacatttttccgaagaaaggcatgatgtatttaaaatatagaaaatatgcctgtctgaatccgaacatttccggctgggatgtttccagacatacaacctgcccgcccggtttgacgacccgccgcatttctttcagcacggtcagatagtcgggaacgttccgcagcccgaagccgatggtgacaaaatcaaaagaatcatcagcgaagggaagctccatcgcatttccgtgcaaaagctcaatttggctgtaaccgccctctttcacttttttctcgccgatgctcagcatatttttgctgaaatccagtcctttgatttcgccgctttttccggctgcttctgcgagggcaatcgtccagtcagccgttccgcagcagacatcaagcgcttttgcgccttcttttacattcatgatctgcatcgttttatcgcgccattttttatgctgctgaaaactgataacagagttcatttggtcataatttttatagattttttcaaacacgccgtgtacgcgctgttcttttgactcctgcatgttgattacccttcttccactttctgatgatatgttttgtcctggctgatcgctttgagccggttcagcatgaggttttggattggtgaattgagcggcagcagcgtttcaatgctttgctttgcctttcggaagctatcttccattatgtcagcctttgatttccctgactttacaatattgccgatgacatcgagaaatatagcattgccgttcatcagccgcttatatacaaaaaaatcactcgccagctctttccagcgcggaagattaaagtggtctgacactctgtgaaacagggccgcttccacaatcgccatgctttcgatcaattgattcaagtcattgacagaccgatcgtacagacggattttatgctcattgatttctttaattgccgtagcgagcgtccgaatcatatagatatccttcatttcagataaaagcgaataatacagtccgctgaaatagtcgccggcaagcacggtgagctgccggtttttattttcgtctcgctttaacgctctggctgttgtcacttcatcgtgggtatcaagggcgctttggacaagcatcgcagttactatgtaattttctctgtcgttgttcttaatgtccgcctcttcaaacaaagcgtgaaaaagaagaagcttatcctcatcgattttaggcgcggaaatatgtttcgctaaataaggatgagacagcttttgttttaatttcgtatttagattcgttaaagttccgtagatgtcttgcaaaaatatcacccttgtccccaaattcacatttattctaatatgtatgagatttactcgtcattattatacgcaggtatcattatagcataaaaaaaagaaattggctgtattctcccgccgtttgcgggcaattggcaaaagcgggaaacagccggcttattttttttcgctgttcatttctccgtaagcggtctggatgagggcgttgcctctcactttgatggcagaggtatgctcagtaaactgagcgataatcacttcgcctttgtccagtttttcggaatggtgaaatttcgtatccgtacctctcgttaaaccgatgacgttcacgccgtcctcgaccgctttaatgacgacaaaatcacttgaatgctttgaattcatatctgcaccctctatcattattaatccgcacgtttaatatgttctaacacttcggaacgcgccgctgcgtcatctttaaaaatacctcttacagcggaagtcactgtttttgcgccaggctttcttacgcccctcatcgtcatgcacatatgctcagcttcgacgacaaccatgacgccgtggggatctaaggtctctacgatgctttctgcaatcgttgaagtaatgcgctcctgcagctgcgggcgttttgagacggcttccaccgcccgcgccaatttactcaggcccgtcactttgccgccgcgcggaatgtaggcaatatgcgcttttccgtaaaaaggaacaaggtgatgttcacacatggaatgaaacgcgatatcttttacaagaacaagctcctcatgctcttctccgaaaacggttttaaagtgttctttcgggtcttcatttaatcccgagaatacttccgcgtacatttttgccacgcgtttcggcgtatctaaaagcccttcccggtccggatcttctccaatcgcctctaaaatctggcgaaccgcctgttcaatctgttctttattaacttctttcattgtctgtgtcctccaccattgaatacatttaatttcgattctagcacatttgccgcgccaaaagcaaaacgaaagtcctgcccggtgaccggggctgcttaaatatgaaaagcccctttatcaaggggcttttctgtgaagaaacaaagtgtatgtatcagatgcatacacgatctatattcacaattattttcctgcaacagcgtctttaagagctttacctggtttgaaagcaggtaccttgcttgcagggatttcgatttcttcacccgtttgcgggttacgtcctttacgtgcagaacgctcgcgcacctcaaagttaccgaaaccgatcagttggattttatcaccgtttttaagtgcatctaaaatcgtatcaaaaacagaatcaactgcttttgtagcgtcttttttagacaattcgcttgcttcagcaaccgcattgattagttctgtcttgttcatgcctttcacctcctcccaaaagggtatcaaatcagcagtttattatcatttcttcacagttcagcctgattctaaacctgtctgataaaaaatcaaagcagggaagaacagacaagtaaacggcttttcataagaaaacagacactttgaggaatgtttgtccaacaaagtgaagattttctgtatgtagagtaacacatataaaaagccatatcaagcattttaaagcctcaatcccttgctcgtcaaggttttcacgtgttttaccgaacaaatattcctttttttgcttttttcctcctaatccttgattgatttccagtatctaaaaagaataaaaaaagaccccccgtttcaggaagaggtccttcagcttacaaaataatggcgatcaggccgcctgagccttcgttaataattctctccagcgtttctttcagtttgtatctcgcattttccggcatgagtgacagttttgcggagattccttctcttacgatagagctcaatgatctgccgaaaatatcggaattccagatagaaagcggatcatcttcaaagtcctgcattaagtagcggacaagctcttcactttgtttttctgtcccgatgatcggtgcgaattcactttccacatccactttgatcatatgaatggacggagcgaccgctttcagccttactccgaaccttgatccctgcctgatgatttccggttcatcaaggctcatatcggttaaggccggggcggcaatgccgtagccggtctgtttcaccattttcagcgcatctgatacctgatcatattcttttttcgcgtgggcgaagtcctgcattaattcaagcaggtggtctttcccgcggatttcaacgccgaccacttcttttaaaatctggtcatataaatgatccggcgcatacaaatcaatttctgcgacaccctggccaagttcgattccggccaatccggcgctttcaataaactcaaattcactgaagtggccgacaacccggtcgacatcgcgcaggcgtttaatatcttttacggtttctttcactgattcctggtagctctctctgagccaatgattttctttcagcaccatgacccagctcggaaggttgacattgacttccagcacagggaactcgtaaagcgcttctctgaggacgcttaacacatctgtttcccgcatgctttcaacactcatggcgaggacgggaatatcatatttcgcgcttaattcagctctgagcgcttctgtttccgggtggtacggttttaccgagttgatgaccataataaacggtttgccgacttccttcagctcgtcgatgactctttcttccgcttccacgtaatcgccccgcgcaatatcgccgattgagccgtctgtcgtaatgacgaccccgattgtggagtgttcctggatgacttttctcgtaccgatttccgcagcctcatgaaagggaatcggttcttcataccaaggtgtattgatcattctcggaccgttttcatcctcatatcccttcgccccgggaaccgtatatcccacacaatccacaagacggatgttgacatcaagtccttccgcgacatgaacggacatggcttgattcgggacaaattttggttctgtggtcattatcgtttttcctgctgcgctttgcggaagctcatcctgcgcccgcgctcggtcggcctcattgctgatattcgggagcaccacaagctccataaattttttaatgaatgtagatttccctgtacggacagcgccaacgactcctaagtatatatcgcctcctgttcgttcagcgatatccttgaaaatatcgaccttttccaagtgatcccctcccggacttcctatccttatcatttttcattcaccattctccaatcaaatacaggacactatatgtgtatgacgttgtcctatttcaatatgacatctttagaaaattttcaggcagtcttttctatcaaaatcaaaaaaacctttctccctatttgtatgcgcgggaaaaaggttcattcctgtttcgtttgactttctaaaaaaacgggttcctgtttttcatttacggtgtaagtgactgaaaaggccgggacgaaaggagtctctttccataaaatatcctgaatttccgcgcccggtttgattttctttttgttttccttcaggcagcgggcgagatcgacgcgatagtcggcatagatttctccgtcagcgccgattaaaagcggcagagacgtgcctgaaaccggacttttgactgaaggagagtctttcatgccgagcttttttttatttaaagtgaacaggccttttgaaacagcgtcctcatagggaggatatgtatgcttttcctgatacattttgacacgcagcttcatgtcgcggattgcttccgccatttggagatcgaccagcttgacggtaggcttattttccacatcgacaagcacgtattggtacattcctccgctttcataagctgaggccggcggctcctctatgtatctgggcgcgagccgcttaaaatctatcggatatttttgatagagcggtgttttcatatcttttgtctgaatcggcagaagtccgccgttcgcctttttaaattcatccactgccgcttgcacctgctgaagctgatgtttgtaagatactttattttcagttttttttgcttcagggtacagacagcccgacagcagaagcaccgccattgccgttatgacggccatttttaacttatgcattccgcgcccccttttggctttattcattgacaggcccgctgaaaacgaccattaacacgatcaatcccgagatgaccatgcaggcataagcgagtgaagaaaccgctgcttttatcagtttgtttttcactttgtacctgctgacataaataaaggcgaccgcaacaaacattaatcccatagcaccaagcgcaaaccacattttcatcaatgccacactcacgttcgtgccccccgtcccatcattgtaagcgttatatttcattttaatatacaaatgttgaaaagatcaacaggttttccatctattgaaaaaacaaaaaaactgaagcaaagaggggactttgcttcagtcaagttgactatattcacctgtacgtctgagatacactctcttggacttcgatgctatagtatgcgtagatgcgtacgtctgcatcctcttctgcctaaatcagcaaatgttttaagcgatttcagccggagagttctgcgttttggactttcgtcacttcagaatatgctgacggcatgttattgtcacttcacccggttttcgaatgtgttgaccaagtcttccatctcatgggttttcactctggccattaaggattctacggccgtttctaccttctgcccattaaataatacttggtgaagcgcttctgtgatcggcattttcacctgatatttttgagacagctgatacgcagctttcgtcgtccgcacgccttcaacaaccatccccatcttatccaggacagcttccagcttatatcctttgccgagcaggttgccggcgcgccagtttcgggaatgaacgcttgtacacgtcacgattaaatcgcctacgccggtcaggccggaaaaggtgagcggatttccgcccatctttgtgccgagtctggcgatttcagcaagacctcgggtgattaaggccgcttttgcattatctccgtatcccaatccgtctgtaatccccgctgcaagagcgatgatattttttaacgctccccctatttcaacaccgatcatatcgggatttgtatagacgcggaaatgctggttcatgaataaatcctgaaccgcttctgcagccttgatattttttgaagatgatgtaacagtcgtcgggtgtcttaatccgacttcctcagcgtggctcggccctgaaagcacgacgatgtcttttctgtactcctcaggcagctcctcctccattaattctgaaatgcggagaagcgaatccggctcaattcccttgctgacatgaacaaaaatcgattgtttcgggatatacggcagagcctttttcagcacttcccgaatggcttttgtcggtactgccacaatgatgaagtcagctccttttaaagcctcgcttaaatcggctgtcccgatgatagaacttgatagctccacacccggcaggtaatctttgttttcatgcagttcgttgatttgatcgatcaattcggcacggtgtccccacatcatgacttgatgtccgttatcagccagcactaaagaaagtgcagtgccccagcttcccgctccaagcattgccacttttttcatctctgtatcacacctttttattttcttgctcttgcaaatattttaattggcgtaccttcaaatccgaaagcgtcccggattcggttttctaaaaagcgttcataagaaaaatgcatcagttccggatcgttgacaaaaacaacgaagctcggcggcttaacagcgacttgagtcgcataataaattttcagacgggagccgttgtgcgtcggagtcggattcatggcgaccgcatccatgatgacatcatttaagacatttgtctgcacacggagagagtggttttcactcgctttaataatcgcaggcatgagtgtatgaatccgctttgtcgtcagtgccgacataaacagcaccggcgcataatcgagaaattggaaatgctcccgaatattctgttcaaattctttcatcgtgcgctcgtccttatcaacggcatcccatttgtttacgataatgacgacggctttcccggcttcatgggcgtatccggcgatccgcttgtcctgctcaaggatgccttcttctgcattcagcacaacgccgacgacgtctgagcggtcaatggcttttaacgcccgcagcacactgtatttttctgttgtttcatatactttacccttttttctcattcccgccgtgtcaacgattacaaattcctgctgattgtaagtgaacgccgtatccacagcgtctctagtcgttccggctacgttgctcacgataacccgctcttcgccgagcatcgcattgacaagggatgattttccgacattcgggcggccgatcaggcagaattgaacgacatcatcactgtacttcgtctccggaatgtttttaaaatgctcggcacaagcatcgagcaaatctcccaatcctaaaccgtgtgtccccgaaatcggatacggttctccaaagccgagcgcataaaagtcataaatgttcgctctcatttcggtattatctaatttattaacggctaatacgaccggttttttcgtccggtacagtatttttgccacttcttcatccgcagacgtcacaccttcgcggccgttcaccataaagatgatcacatcagcctcgtccatggcgatttcagcctgctggcggatctgtgtcagaaacggctcgtctccgatatcaattccgcccgtatcaatcaggttaaaatcataattcagccattccgccgaactgtatatccggtcccgcgtcactccgggggtatcttctactattgaaattctttcacccgcaatccggttaaagattgtggattttcccacattcggtcttccgacaatggctacgacaggtttacccatagtacccttcctttcaatccagccgcttacattttcacaaaaaattgttcaaccggttattaataatcatcttcgctatgaaaagaacccttcaaacagaagggcttaactcatttattatatcagttttcactgagatcacaatgtattcttcaaaatgtttcgtattcatgtaacagtctccgtctgttttcaagacatttttgtcgctcctttgccctgctttttgcttttttggctgatgcgcgccgcaagctgttcatatgtagtcagcccgacgagaagaatcactcccgccgaacagcctgatagccatttataatcaccgacggctgctgcccccgcaatgttgcggatgaccgcagcatacaataactccccctggcacatgccgagaacaaaaagacaaagcctctcagggaaccgcccctcaacagaaagcgtaataacggtaagcagtataaccgctgcccattcaggttttatgataaaccaaacagggtcatataatgcaaaaagaaaaataaagccgtacgccgcagccgccgtcagatgaatcacaatatgacggagccgtttatgcatgccgaggcttcccgcataaacaaatgccgcagcaaaaaacatgacatatgccgcgttcagcgtaaaataagccgttatctgatgtatgcttgccatcatattagtcaaaataaagactgatacgtaaaaacggctttttgttttggcaaaaataaaagtcgcaagtatccataaaaaccacattgaccagtaataataaaacggttccataatcgctcctcctctgaccagtatggagcgggaacgcattttttaaaccaattatgcctgaaaggagcggataaaaatgggaaaagacagacaggagaaaaaactgaaagcctcccgccgggtggaatctgatcgcgatgattcaattcaccataaaggagcgacgagccttgaacaaaacggtgaattccgaaaaagaaaatcgtaaaaaacagagaaaggcatgcgggttcgcatgccttttaacgtctgctgaaacgggatgtgtcaattccccgttcagaaagccagtgatgtgtgtcaccttttatgaccaaaggcgccttttgcaattgggcaaccgattggcatccgagggcggtcataatcattttcagctcttgtaaaagcaccgtcatctcgtcaaacagcccctcttctcctttggaggtgagagctttcaggaaagtgcctgccattcccgcgccagaagcgccgagggcaatcgatttggcgacatccagggcactttgcagcccgccggatgcgataattgattgatcagcggagagcgagtggatttccgctaagcttgcggcagtggaaattccccatgtattaaaaaattgaagcgccttctctctgcgcatattttcaatcttagagaaatttgtaccgccgtatccgccggcatcaactgctgccgcaccggcatcaaataactgccgtgccgactccctgctcattccgaagccgacttctttgacaaaaacgggaactcccgcttccgccgcaatccgctcaatacggccgagagcgccggtaaagcttctgtctccctccggcatgacgatctcctgaatcacatttaaatgaatctggagggcatccgcttgaatcatatcaattgctctttttgcctgctcggcatccgcctcgctgcctaaattggcaaatatcagcccgtccggattctcttttctgacgatctcgtaagaataccgttcggagggatcttttaaagccgacatttgcgaaccgacagccagcggcatgccggctttgcgcgcggctcttgccagcgatctgttaatttcgtatgtaagctgtccgccgccgcctgtcatcgcattgataaaaatcggcgaactgcttgtgagtccgccgattttcgttgatatatccactttttccaatgctaggttcggtaggctgacatgaacaaacgtaatatcatcaagccccgtttcccggttttggccggtagacagcgcatgatttatatgttctctttttcgttctgctcgtgtcacgttttatcaccaatttattttaatttattaagcttgtctccgattaaatcgccaagctggaagccggtgctcggctcttctttcgcctggtattgacggaagtcctcctgatcggctttcggcgcttcttcaagctcacgcatgcttaaggaaatgcgctcttcgctttcgttcacgtcaagcactttcactttaacagtctgtccttcttcaagcacttcatgcggcgttccgatatgtttattggaaatttgcgaaatgtgcacaagtccttccacgcccggaagaatttcaacgaaggcgccgaagcttacaaggcgctgcacttttccttcaagcacatctccctgttttaccttttcgccgatctggctccaaggtcccggcagcgtttctttaatagataaagaaatacgctcgttatcgcggtctacggacagcactttcacttttacgtcctgaccttcttccaccacgtcagacggtttttcgacgtgtgaatgagacagctgcgaaatatgaacaagcccgtcaattccgccgatgtcgacaaatgcgccgaaatcagtcagacgctgcacttttccttcaagcacgcttccaacctcaagcgtttggagaaaatcatgctttttggctgtctgctctttttccactacagcccggtgtgacagaatcacccggtttttatcacggtcgagttcaacgacgataagagagagggttttccctttatagtcagtgaaatcctcgacgaaatgagcttcgacaagtgatgcgggaatgaagccgcgaacgccgatatcaacgacgagaccgcctttcaccacatctttcacttcagcttcaaacacttcttttgtgtcgaattttttttcaaggtcttcccaagcgcggtcagcatcaacggcacgtttagataaaatcaaagcatcgtcttccacttttgttactttcaggtcaagctcgtcgtcaacttttacgacatccgatgctttctctacatgaagacttgataattcactgattggaatgattccggactgtttgacattgacaatttcgacatctacatgcttgtcctctacctttgtcacaatcccttttactacatctccaacctctggcacttgaacatcaatttgattcatttcctctgtcatttgaataacctccttggtccaaacctacacagcttaattaatacggtttgaaagctgaacatgtgaatgtccgcttttcagccgaatatgtattaaagaatcatccaaaaaagattttgaatgatcaataaaaagttttattagtattaacttctaataaaaggactggtttgtcaagcaataacatcttgtcttttgaaaaaaattaaaaagcgctccgcccgaagttaacgtgatttctgttcgacgatctccagaatttttcctgcgacttcggcaatgctgagtgacgtcgtatcgatttcaatcgcgtcttccgctttgcgcagcggggaaacttccctctctgaatcgagtttgtcgcgtctggcaatttcttcaatgagcgtctcgtaattcacgtcatagccttttttcttattctcttcatatcggcgcttcgctctttcctctacggacgcgagcagaaaaattttcacttcggcatcaggcagcacgtgagtaccgatatcacggccgtccatgacgacaccgcctttttgtccgagctgctgctgtcttttgaccatttcttctctgacgcctttatgcttggcggcgatggatacttggttgctgacttcgtcttttcggatttcttctgtcacatcttctccgtttacgagaacgatttgtctttccggagcggatacaagctcaatttccgtacgcttcaaaagctctgtaagcgcggcttcatcggttaaatcggcattctgcttgagtgccgtatatgtaatggcacgatacatcgcccctgtatcaatgtacacatatgattttttctcagctactattttagcaacggtgctttttccggcagcggccggcccgtcgatcgcaattgataatttcttgtccataatctctctccttgctctttactcctctatggattgtatcatgaactgccggaaaaggggcgaaaaaattgagctgatttaccgctttaccgtttcaatccattcttttttctccattttatcaactccctcatatttcacagctttcgaaatataaggttcaataggctgataatgaagcaaaaactgcaccgcgcccaaaattataagctgaatgcagaccaatttgaccagcagacgttcaaatgttttcatacacgcgcacctccattaggattagtatggaaaagtgcgctgctgtttattccgacagactgtttcttctctgctgcagctgcgcgcgcatacaatattggagtaaaagctgctgtgctgcggggccgatttctgtaaattcaagcgtcattttttgtttatccgccttttcatcataaaaaatccgctgggtaagagcctcggccgttatatccgccccattttccttgccgggaagagaaaatgagacatacagcttttcacctggttccgcggaaatatgctcaggcatcacaacagcgattccgccggcgctgatattagaggaaaccgtttgaaaagcggtttttttcgcttccaatttgacggatacatccaatactgcgtctgcacggacgtatcggcgtctttgaatccgcttcatttcctcctgagggggatgtccaatccgatcatcgggatgggttcttttttctttcctttaattatgcttttaaattgatacggtacttggccattccccataaattccgctgttatttccaatcctttatgcaaaaagaccgtccgtcccgaatccagatcgacgggatatgagatgtggagttcgccgttttcaacgcttactgctttactcctcgcttttttgggctcattgttctctatgtattcaatccaaatataatctccgacagctatcatggccttcactctttcattatttatgcttttattaaagcatgtaatgaaaaaaaggaaaagacttttagtcctttcctcctttatttttataggtctttatatataggctctgcgctttttaatttttctattttttcctcttttccgtcgtccgcattaatgaacatttgatacgtgtctttcccgatcgtcccgagcatttcgtagcaaagcacttcctgaccgagttcattcgtgatcagcgcctgccgggtctcccgcacttcaacatttttattcagcttcgctttcgcttcatcagctgacaaagcgggagccggaatcgttctcgtgcggtgcgccgccaggtaatcacgcgcggaaaaaccgacgacttcaccatcatccagcgccactttcattcggatggcttccggataaatgcggacgtttttctccacgggaataaaagaaaagacgccgatgttattatattgcgcgctttcatcaatttcgagaccttttgtttcatatccgtttttctttaaaaacgcgacagcccggttagatgcttcattgaggctgatcttttgtttcttcacggcccgtttttgaatcaaatagacaggatgtccccctttttgggtaatatccatatagataaaagatttgtgatccgcgtcattcatgcggatactgtatacatcgcgattcgtcttccggccgcttttgaccactttaatggaataattatgatcaggcgcaaaccgttgtgcgatttttaccgcttctttttccgtaatttgttttcctttcagatgcgtaaaaccttttcgttctgtatttgctcccgtaaatgtggggctgatgctgtcttcagaaaaagcgcctacatttttttcgactgttttaaagctgtcgacgatcgtattatcgctttgttttttgtcagaggcgagcgccatttcaacatccatccaccgtaaatttttgctcatgacgagatgctgaacgctgcgaagctggttttgaatgttctccgcctgtttgtacaggctgttcagtgttgtatattctttcttatcaagcggtttttggtctaaatcccggacggatgttttatagctgaaatctcctatattggataaaaactcctccgtcttattaaaaggcatgagagtcaggggcagctggctcacattgttatgcgcttcagatgtaattctccatacatcaatgagcgccggagacagagattttttactgttcatcgcaagcgtcgtcccgattttgtcgtgaagctgatcaacatggtacgtcagttcatgaaaagccctctgataattattttccgcgtgcagaaggaccgcatctttttcctgatgctctttatatccccagtatccggttgcggcgatcgcgacaccgagaacagcgataatgattcctctaatcatgttaacacctcattttgcgtacttttactcacagaaaatgtgctttccgattcttttaatctgcggacgtccccaaatccatttgcttgtcgccgtatcaggattgaaataataaagcgcgttttcagaagggtcccatccgttaatcgcatcaagaaccgcttcttttgctctttcattcggctgcatgtatatttggccgtcggcaacggcggtaaacgcgagcggttcgaaaatgacgccggccaccgtattcggaaataacgggcttttaatacggtttaaaataaccgcggcaatggcaacctgtccttcaaacggctcaccgcgcgcttccccgtacacagcctgcgccagaagattgatgtcgttgtttgagaaaccgccaggcatattagccgctgtcgtattttgcttttgatttgactgaccgcctgtattgttttgcggcttttgagcaggcttattcgtttccgcaggcttctgcgctccggctctcggttttgtttggttttccaatgggacgttgccataatgagtgaacgtattccctttttggatctgctccattacatattcacggtaatattttgattttgaaatcagcacctgtttggttttcgccccgacgaggccgtcaaccggcttcatgccgaatttctcctgaaaatttctcacggcccagtatgtggtccagccgtaaacaccatcgattttcccgttataaaatccgttatattgaagacgggcctgcaattctataacatcatcacccgtcgcgcctctttgaatcacttgatttgaaaacgcatgaaccgtttcatgatgatcgaagaaagcggcggcgaaagaaaatagaatgagacatgccataaaggctcctttgcacttcatctcttcaagcctcctactgcaaaatttaaagtgtacccgtattgtctgtcacgcggatatttttatacaccgtttccttcttatccctcatcaaggcataaaaaaagaaaccgcacgcgatgcgcggtttcttcacacttggatcatattgacggagcgtgctttttttgcctttcgcagcccgaaccaccataaaaacagcataaacggcagcatataatatacccaatgattgagggcggtaagaataaaatcgtaagaaccgtgcagacatgaaggcacggccagcgaaatcacaagccatttgacacgggcttttttctgcgaaaagcgggcttttccgagataaaatcccataatcactccgatcagcgcatggcaggagaccggcagaagcgctcttataaaagcatgctcaacgccgtggccgaataaatacagaatattttcaagcgtggcaaagcctaaagacacactggccccgtaaacgattccgtcataatgctcatcaaaatgagcatgcgggtacacactgatcatcagaacgaaccatttcaccgattcttccaaaaatcccgaagacaaaaacgaaacgaaaaagcttcctccccccacatgctctttttcaagaacatattggataaacatggtcggaaacacaaggacaaccccgagaaaaaaagacctcagcaccatatgtacaggttcattgtcatactgatcttttaaataaaaatagcttaacagcgcaatgccgggagcaattcctgcagagatgattgcaaacatcaggcaacctctttcctttatattcctatatctatggtaccatgttgttcatatttttacatctttcaattttttaaaaaagagcatatgaatgatcatatgctctctgcacccagccgttttgatatttcgtttgcgatcaagccgccgtgaaaacggccgttctcgataaaaatttcattggcgttatttccagccgcaatgactccggcgataaaaacaccgtcaacatttgtttccatcgtttcttcccggaaaaacggccggcctgattcagcatcaatctgcacaccgattttttcgaggaaaccgtgatcgggatggtatcccgtcatggcaaatacgaaatcgtttttcagccggaccgtctcatttcggccggagcggaaaatgatttcatcttccgtcacttcttcaagacaagcgccgaattccatccggattgtgccgtttctgacaagggcctcaaactcaggcagaatccacggcttgatgctcggggaatactcatgtcctctgtagagcaccgtgacgcgcgcaccggacttcacgagttccaaagccgcgtccacacttgagtttttcccgccgatcacagcaacatctttatcaaaataaggatggccttctttaaagtaatgaaataccttaggaagcccttcacccggtatgttcatataattcggatgatcataatatcctgtcgcaatgatacaaaacggagtgaggtagcggtcttttgacgtttctacaagaaaacggccgtcttcctgtttcgttacgcgctccaccgtttcaaaggcgtttacgcgcagctcttttcttctgacaacctctctgtagtaagagagagcctgtattcggaccggttttctgttttccgtaataaaggcgacatcgccgatctccaatttttcacttgaactgaaaaaagtttggtgcgtcggatagttataaatgctgtttacgacattccctttttcgatcacaagcgcgttcacgccaatttgcttcagatgtatagccgccgataatccgcaaggacctccgcctattataattgctttttcttctgtcatgtccttcaactcctgcgattggcatttccatcataagtttccactcatataaaaaatctcctatattatcataggagattttttttgtttatgcaaacgattggtttatatccagcctctgaaacgcgaagcctcagccattttccgcacgccgaccatgtaagccgcaagcctcatgtcaatccggcggttttgggacatttcataaatattattaaacgattttatcatcatattttccagtttttcctcgacttcttcttcactccagtagaagccctggttgttttgaacccattcgaaataagaaaccgttacaccgccggcgctcgccagaacatcgggaaccagcagcgttcctttgtctgtcaggattttcgttccttccagtgtcgtcggtccgtttgccgcttctaccacgattttcgctttgatgcggtcagcgttttcttctgtaatttggttttcgatcgccgccgggacaagtatatcacagtccagctcaagcagctcctgattcgtaatggtgtcattgaaaagcttcgtcaccgttccgaagctgtctctgcggtcaagcagataatcaatatcaagaccgtccggatcgtaaaggcctccgtacgcgtcagaaattccgacaactttcgcgccggcgtcatgcataaacttggccagatagctgcccgcatttccgaaaccttgtacgacgacacgcgcgttctgaatatcgagaccttttttcttagccgcttcttttatgcagatggtgacgccttttgccgtcgctgattccctgccgtgggatccgccgagtacaagcggttttcccgtaataaagccgggtgagttaaattcatcaattcttgaatattcatccatcatccaagccataatctgtgagtttgtaaatacgtcaggtgccgggacgtctttagtcggtccgacaatctgactgattgctcttacatatcccctgctcagcctttcaagctctctgaatgacatatttctcggatcacaaacaattccgcctttaccaccgccataaggaagatcaataattccgcattttaaactcatccagatggaaagtgctttcacctctttttcagttacattcgggtgaaaacgaatgccgccttttgtcggacctacggaatcattgtgctgcgcacgatagcctgtaaatattttcacagacccgtcatccatccgaacaggaattttaaccgttaataatctgagcggctctttcagcagttcatacacttcttctggataccccaatttttccagagctttatgtattacggtttgggttgattttaatacatcatgtttgtcttcttcattatgaccggtgaatcgatcggctgccatttgagttaacctcctaaaatcttctgtttctctcatgctccctttcagtgactagtatacaccttcaatatctccgtgcatagaagaaagacaatgatttttccattatttcgcttaaaaaaagacggccgctgaaaacagctgccgtttcaaatcttttttatgaaaaatgtttctggatggtttccacagcattgccgtccatgatgagttttccgtactcatggagcctgtaaatcgtaattgtcgccgggtgtccgtattcagccagcaccgcgatgacaccttcggcggaacgggagccgaggtcttcaaggcttacatagtattggttctcataatggtagacggtgccgccggtaatcccgatgcggtgaaggcttccggcaagctgaatgatatcttcaaacgaatggaactgataaataatatccgggctttcgtcaagtttgacctgcatctcgatataatcatcgtcatattcgtcatcttctgcgtccgcgtcatgatttttcgttacaatcacaaccataccttgtgcctgaagagaatatacttccaccgcgatcggaccattcgcttcaaagccgagctctgtatttgcttcattcatcatatctttaaataactggtggactttaaacgagtccttccagaggtcttcttttgtcagtccccgatcagtcagatcgtcgagggttaaaaagattttaatcttattatagttcagacgctcaagccgcataatgttccctcctgcctcttcttgcacacaaatcatataacacagtatatgaataaatgagtcataggttcttaatttgttatcagtttacaccgtgtacagcgggaagacaagcagaatgccgttttttatcaccgcggccggatttgtttcaggaaaacggctcatccggcccgcacagcgtaatcatatgcgtctccggcttcgccccgagcctcagcggaacttttgtcgtcccgtagccgttgctgatcagataatgcgctttttttaccgttcccgccccgcccaattcgtacggcccgaaccggccgaaacggatttggccgccatgcgtatggccgctgaacacagcgtcaatcccgtctgactccctcatctgctcatggatgtcggggttatggcaaagcagaaggtttactttatcagcatccgtatatctgattgcagcttcgtaatcatccatcatcatcctgatatcatccaccccgcagatcgtaacggtttcccctttataagcaaactgaaccgattcatttctcagcggaatcactttgtatgcccgtaaaagtgagagcaatttttgctggctgacctcgtaatcattatttccccacacataaatgacaggcgcgagagccgtcagacgtttgatgttttcttcaattctggcgtaaggaactccgccctccgccaaatcaccgccgagcaaaacggcatccggcttataaactgccgcttcgcggagaagcttttcatcaattaaacggcggtgcacgtcagatataaagaagatggtgagcggcttcatccctttcattttatcaagcgtaaatgtatgtgttttcagatggctgccgtttgccgttttgtacatgacggccgccataaccgcagccgctcccgccaatgagccgagaattcccgctgttagcttcataaacgcactctccattctgtcattgtcttacattagacggacaaacaaaaaaagacgtttctatcctttccggaaaacgcctcattttatttgctttcaaaataaagattgatatcataccgatgtttcatcaagtgaaaaacagattctctcgccctccatttttcaggctggggccataaatccgtgcttttttggataatttcacatctcagtttatgaaattcaccctcagctttttcttccttttttttaaaataataagaagtgcaatacgcaaaagcggaagccataatccagcacaaataaaccgtatggcctaatatttcctgcagaatcagctgcggagaggcttgggggcattaaagcttttaaacatcagcagtatgcacatcagggaaaaacaaacgagggacgcccactgccatcttcggcattgtgcggcataattttcgtattttaatttccgtttcaccagcgcctgaagcatttgtttcgtcggtccgtcagcaaatcggtctaattgcttccataaagaatccatgcgcttcacaccttgtccgttttcattagtacactatatgaaaaacgcggtgaaaacatgcatttattttaatcagacagcggaatgttcagaacctggccggtgtacacgtcgtttccgtttaatccgttgtagctgcggattttttcttcgcccgcccggcttttataatatttcattgaaatgcggtaaagcgtttctttcggctgtacagtatgctgtacggtccgcacttttttcgggacagtcccagcttgatcacttgcggcagccggagccgctttttcacggacagccggcggagactgctgttttgtctccgcgtattcggtgtctgtcggctttacttgtttttctgaggacgtttccgttttttcaggtgttttttcacttggtttttcttttgttttttcagatgcagccgcttctttcttatctttgtcgtcagacttttttttcggttgttctaaaagagcggtttctgacgtatctttctgagcgcctttcggaataacggcaggcgcgctttcactgtggtctatgaagacatcttcatagtccttcgggtcaaatctgctgctgttcgtcatataaagaagaccgaaaaagacaccgattgttacgataatgaacaggacggtcagaaaagtgaacagcggcgtttttgttttggttttttccttcacctgctcttccttttttttacgctcctcttttacagattgtcttgtcgggaggctgtcttcaagatattcaatttgttcatccgcggccgcggcaacctgctgctcggcacgctgctgagcttttcttctttcaactcttgacatttccgtcatgcaaacccctcctaacatattgaaaacggatctgacaggcaaataccgcatcaataataaaatgcgctgtaaccggaacgaataaattgccggtccattcatagataagccccagcaaaagactgatgcccgcaaccatcataaacagaagccacttcgccaagtatctgaaatgaagcacggtaaaaatgaagctggcggcccataagccgatatgtgtctgcagaacgcctctgaacaaaatctcttcgctgaacgaaatgagaagcgtcaaaaacaaaatgtgcagaaccggcctgttcttaaaaagcaatacattaatgccgccgtcatcatataaatgcgaaggacaccatttcatcaccgccagatcggcaaaaatgacaaggacggcaagagttacaccgtaccatatgatattatcgtcacgtatatgccacagctttaaaaaatcgtgaatgtcggtgaaaaagaaaaagccgataacagctgaaaccgccaatatgagcaattgggtggcatacagctgtatcacaatctcccggtctgagagctgctggatcaattcgctttgccgtctcagctgaactcacccgcagactctgaaccgaaaatccggcctaattccagcttccaatcttcaaaccgttccatgtttttccgttctcctttttgctcgtacggagccagatcaagtccgcagctgctgcagcattgtccggtttggccttcaggctcatacgattcatcaaaataagacagcagcgcttttcttatacattctttccgctctaataacgccgaaaaacggttcattttacgcagcttcttttccacgcggtatgtcagttcttcctgcagctgctcttttgtggtttttccttgcagatacagatggacggccgttcgcgcctgtgtttcctggacgcctttattgatcagaacgtcccgaagctttcgctcatcatccgtaccggcatcccgtatgacggccaaaatgccttccagatcataatcagacaggctttctgtctgaataatctgctgctgaagctcggtatcgccgggcgccctcagcaaaatactgacactcgggctgccgtcgcgtcccgctctgccgatttcctgcataaagccctcagccgtttggggaggataaaagtgaatgacaaagcggatatctgacttatccacacccatgccgaacgcattggtacagcagatgcaatcaagctggttatggataaattgctgctggatcaagattctgtcccctgtatccattccgccgtgataataatccgtccgctttcccgttttttcattcagctcagccgcaagctcttccgcccattttctggtcggacaatatatgataccggggccttcaagcttttcggcaagctccgtgagcctgtttattttttcggcattatcagccaaatgttctgccgccaggagaatattcggccggttgactgaataaagatgacgcaccgcatgctcaagtccgagcacatccgtcacgtctctgagcgtttcttttgtcgctgttgcagtcagcgccaatacaggcggctttccgagtgcctgtctgaaaggcccgagcttcgaataatcaggcctgaaatcatgtccccattccgatatgcaatgagcctcatcaataacaaataaactgaccggaacgtttttcaaacggttcagtacataaggtgaagaaagggcttcaggagacatatagagaaatttataccggctgatgttgctgagaataaaatgccgctctgcggaattcagcatgctgtttaatgccgcaacccgcttttctccttttgctttcagctgctgcacctgatcttccattaatgaaagaagcggtgaaataatcagcaccagcccgtccatcatgtaacccgggagctgatagcataatgatttcccccgccggtcggaagcatggcgatcgtatcctttttttggagcacgctagtcataatctcttcctgcccttttttaaaggaatgcaaaccaaaatatctggataaagctttatgcagctcagtcatgctgattcaccgtctttgccagcgccagcctgatctggaaatagctgaagcgcatctgcattccttcgcgaatccgtttaattttatttgtttgatgctgttttgcaaatgccgttatcatacgctgttcctcttcagaaagatactgttctataaaaaatgcaggctgatgcaatgatatttctacgatatgatcttcgattgtggcggtttttaaatttctgaccgcggcgatccgttcaatcggaaaccctttttccaacagctcaaaggtttttctggcagactgtgtcagcgcgctttccgcctgcagatcggacaacagctcgcgcagagcgggatatgcacattgcggaagcgattgaataacataatgtaccgctccccaaaactggacggacacataccattcatcttcgttcagctggagagcgagctgcttattcgttttgccgattctgttgaatgaagttaaagaatagacaaaaataagcgcctgccgttcacttacgccttgcagaagctgaaacagcgcgtcatgcatttggacggaaagctctttagcatctctgtttttccgcatgaaccatttgacccatctcagcgtctgcacatcgttggtaaccgggatatattgactgcattgatgctctttgtttgacaggacttgaatgagcagggaaagccgcctccacaggatgacggcaggcgtttgataatttgcgccgtggcagtgcttcggccaaggccgctcagcaaacgcccgttcaagcctttgaacgccgcgcgcagtcactttccgcgttccctcttcttttccggctgtgatgtatgagttctcggtgagtctatgcatagaagccgcaatatcgccgcgttcacactgtgaagccatgccgaaatatttagcgatctgaaataagccggcatcctgaatggtttgagacgacttttttccttttaataaatgaaacacagcactcggagtccgttcgccgtctattttgtccagacagtcgagaaccacggtatcaaagtagtttatcgccaatctaaacacacctacatttcttttgtgacaagtttcgttttttggttctttttattttaacagattttcatataaatttgacgtttaaagtcatcttttagggggaagtgctaaagagaatcccttatgtgataagcattctcaatcatttttctgttgaaatttgacactaacatcattacaataagtaagaggaataggtgttatatttaaaaatatataaggtaaaccatttgttccaacacgaacaatctgggaggttttattcatggcaaagtacacaattgtagataaagatacgtgtattgcatgcggcgcctgcggagctgcggcaccagacatttatgattatgatgatgaaggcattgcgttcgttacgcttgacgaaaataaaggtgtcgtcgaagttccggaagttctggaagaagatatgattgacgcatttgaaggatgccctactgattcaatcaaagttgcggatgaaccgttcgaaggcgacccgctgaaatacgaataaaaaagccctccccgtgagaggagctttttcgtcctgaataagactccggctgttatcggccggagtcttatttttttgccgatcagcacaaacaaaaaaagcgtccggctgttcttcacagagcggacgctttaagcctttattgtgtttggatgctgcgtttttgttcaatccaaggtttcagcttcgtaaagatgaacgtaaagacgatggtgatgataatgccttttacaatgttaaacggcagaattcctgcgacaaccgccgttttcaactggctgtttgacaatgccggtgaatgtaaaaaccaagtatacgcgggcaggataagaatatagttcaaaatactcatcagcacggtcatcgccgcggttccggccagcaggctcactgcaagcccttttgcagaattgagctttttaaacataaacgccgtcggcagaataaacagcgtccccgcgataaaattggctgcctgcccgacaggcacgccggccatgcttccttgaatgatatactgcagaatatttttaatcgcttcaaccgcaatccccgccgcaggcccgtaaaccaaaatagcgataattgcaggaacgtcactgaaatcaattttcaagtaatccggcagccccggaaacgggaaatttaacagcataagcacaaacgcaatactgctaagcatactgatgacaactaatttttttactttcacaatgctctctccttttcgatcaaatctctcgaaaagaggaaaggttcttttgcgccccaataaaaaaaccgcttttgttaaaaagcgggagcttactaaggcttggcaaagaaacgtttgatataagcatcaaaacgtctgctgaacctccatcttctcccatccagactatactgtcggctccggaatctcaccggatcctgccgccgaagcagctcgcgggcttagagcgtgacgctcatcaccgccggtagggaatttcaccctgccccgaagattgatcttatgaatttattcacattatatatgatcaaattgtaattgtatagagaactgctcaaatttaaataaaatattggggaagcccaatttcagctgattcagcggtttccttttctcctttactgcgtcaatacacattgacactctattgagaatatgataaattatcagatatttagtcagctaaactaggaggaaatctaacaatgtttcgagttttggtctcagataagatgagcaatgacggcttaaagccgctgatggaatcagactttatagaaattgttcaaaaaaacgtcgcggatgcagaagatgaattacatacctttgatgccctgttagtccgcagtgccacaaaagtaaccgaagaattgtttaaaaagatgacttctttaaaaatcgtcggcagagccggtgtcggcgtagacaacatcgacattgatgaggccacaaaacatggagttatcgtgataaacgcgccgaatggaaacaccatttcaacggcagagcatacattcgcgatgatttcttcattaatgagacacatcccgcaagccaatatctcagtaaaatcaagagaatggaaccggacggcttttgtcggggcggagctctacggaaagactttaggcattgtcggtctgggccggatcggaagcgagattgcccagcgcgccagagcgttcggtatgacagttcatgtattcgatcctttcttaaccgaagagagagccggcaaaatcggcgtaaacagccggacattcgaagaagtgcttgaaagcgcggatatcattaccgtccacacgcctttaacaaaggaaacaaaaggattgcttaacagagaaaccattgccaaaacgaaaaaaggcgtccgtcttatcaactgcgcaagaggcggcattattgatgaagcggcgcttttggaagcgctggaaagcggccatgtcgcaggcgctgcccttgatgtgtttgaagtggaaccgccagttgaatcaaagcttcccgaccatccgctggtgatcgccacacctcacttaggcgcttcaacgaaagaagcacagctgaatgtcgcggcacaggtttctgaagaagtgctgcagtttgcaaaaggtctgcctgtcatgtcagcgatcaacctgcctgcgatgacgaaagatgaattcaaaaaaatccagccttatcaccaaattgccgataaaatcggaagtctcgtatcacaatgtatgaaggaacccgtcaaagatgttgcgattcaatatgaaggcaccatcgccaaacttgaaacatcatttattacaaaaagcctgctgtccggtttcttaaaaccgcgtgtagactcaacggtcaatgaagtaaacgcgggcggtgtagcaaaagaacgcggtatcagcttcagcgagaagatttcctccaatgaatcaggatatgataactgcatcagcgtaaaagtaaccggagaccggagcacatttacgttaacggctacgtatatccctcacttcggtgaacgaatcgttgaactgaacggctttaatattgacttaaatcctgccggccacctcgtttatatccagcaccaggatacgactggtgtaatcggacgcgtcggacgcatcctcggcgataacgatatcaatatcgctaccatgcaggtgggccgtaaagaaaaaggcggagaagccattatgatgctttcttttgataaacatttagatgataaagtcgtcaatgagctgacttcggttcaggatattgtttccgttaaactgattgaccttccgtaaccaacagaaaacccaaaacattcatatgttttgggtttttttacgtttaatgggtcggaagcggattaggcgcggcaggcacagcaatcggttttgtcacatcataattaccgattttctttgcgtgcgcatgtgtgaacagcacctcagaataaccgaattccttcgcggttaacaaaagcccttcgatcattaaaatgccttccagcgaatcttcaactttatgtttttcggacaattggatccgcagctgctcgccgtcttccctttccgataccgatgcaatcgcatctgcttctataatgctcgcggtctgtgagcctccgtctgttgtcttcatcccgtcaatagcctgatatactgaataataggtttgttcagacgggatgagatactcttgtcccagactgtcgctgtaagaaaaatacgcccggtttgtctgtttatgtacggacatctcagcggaaatgccgtaagatttataaaaatcctgtccgtctccgttttgaacctttttcaatttaatccgctcgtaaggactccatgtcaaagtctctttcagcatctttttcaataaatcagaatcggcagctgattcgatagaaagacgtccgtttacctgcacaagcaaatccttcttatccgccgttacctgcacaccgtccaaaaggttcggcacagagaggaaagattcgggcacttctaagtttcctgcatcagataatgcctctgaaaccgattcgtcaggcttctttttttcaaaactgaccggaatgacggcggatgtatctgaatcggcaaacgccaaagtaatgtaattgtttttgttttcgttagaaacgacaaacgtcttctgatccggcttgacagcagctgactgactggctttttcagcttgaccgctgtcagctgtaagatcaccggcagatttgtttgtcatcaggtgaggagaaataatcagagcgatgcacaatgcgcagatgccggctgcagcggggccgatccagcttcgggccggttttttcctgtacggtttacccgtttcaatattccggtaaatggcctcgggtgaacgatgatctctaaccgccggaagttgtcttaacaactcctctactctttcttcgttccaatatgacttcatcatccattagctcctccctcaaaagctccatctgtttccgaagtattttgagccctctgtgttgggtcgttttgactttgctttccgagaagcggagagcggcggctgtttcctgaatggaatatccctgaataaatctcaagataataacagctctttgatcaatggtgcaatgatcaagcgcggtataaatttcccggacattttcatgctgtacggcgagttcgtccggaagcaaatgctgatctctgacatcttgtgtatcccaatcaaacgtacccataatacgctgtctgatcgtctgctgcttgcggaaccagtcaatcgccacatggcgtgcgatggacaacagccatgttttttcactgcttcttccttcaaatgtatgataggaattcaagacgcggatatacacttcctgcgtcaaatcttcagcctgcgacttatcttttaccatataaaataaaaattgatataaatcttgatggtatgcatcgtataatatctgaaaggtttcttccatgggaaacccctccgttcacttttttgtcgtaaaaatgcgttgaaaagttacattacaactatattacgagaaactggaatttggaagggaatttatattaacatattcttaaatttttaaaggagaaaaaaacaaaaaacacccgcatgttctgcgggtgtttcgtatggaacaagattgttcgtcaatttcagacgtcatcctgcgcttttgtcggaatataaaatgtaaacgtcgtccctttgtcgatgctgctgtgaaccgcaattgagccgccgtgggcttccacgatattttttacgatggcgagtccgagtccggtccctgccctgcctcttgttcttgctttgtccgctttataaaaacgttcaaaaataaaaggcaggtcctcttccggtattcccgagccggaatctttgatatcgattttcagtccgtcttttacggtatgagccgcgatatgaacgtttccgcctgactccgtatggcgcagcgcattatctataaggttggtaaacacctgttccattttgtcttcgtcaaagacacactccggctgagacaccgagatgtcctctgtgagcgaaacgcctttttccttcgctacaccggaaaatttgcgggagatcttctccagaaattcatgcaggtttaccgtttcatagcgcagacccgtatgtccggattccattctggccaaatccagtaaatcattgacgagccggcccatacgaagagattcatcataaatgatctgcgcgatttcttttttctcctcttcggtgcttgcaatgtcgtccactatcgcttcactgtatccttgcagcatagaaatcggggttctgagctcatgactgacattggcaatgaagtcttcacgcaatttatccagcctgcgctcttcggtcatatcacggagcacggccacggcgccgcggacgtgtgattccgcataaagaggcgacatcaataaaacccatgaccttccttgaagcgtcatttcaatcatttgctctttttccgtgttcactgcattttgaaacagctcttttgcttcagggggaaggttgtctccttctttaatgttcatgttctgctcataataccatgcctgcagaaaacgttcggccggcgggttggtcaccaaaatggtgccgtcgatattaatggtgatgaccccgtctgccatactgcttaaaatattggacagctgttctttttcctgattcagcgcgttaatatggaaattgagctgccgtcccatctgattaaaggcaatggccagttccccgatttcatcttgggtcagaatcggaatttttgtatcaaactttcctttcgccaagtcttgggcgccttcccgcattttccgaaggggatatgtcaccctgctggataaaaagaatgcgaaaaacgttgtcaagacgatggcaatgcccgccgcaagaaaaatatagcgtgtcgtatgtttcgtcgtatctttgacggcaagcagcgattgggataaaaagaccatgccttttttgccgtctttttcatagggcactccgacgatcagccgttcattatccgaaccggcatttttggggaccgcgcgtttgcttactttattgcggtctgtcagcgccttgtgcagatcccggtcatgtttaatctgctctaatgtaatagaggataaatgattatcgtcattgggcgaataccagacatgcttatcatcctgaatgatcgcgatgctcgttaaattgtccgccagttcccacgtgatggatctggcaagcggctggtcttcatgattttctattatgaccgcaattttatcggcaagctgcgttaaatctttttccgcttcttcaacgtggtaattttctataaattccagaagcagcaccgttaaaataaataaaacaattaacacgagtgaaagaatggtaaaccaaagctttcctactacgcttttccaaaacttcattcagcgcctacctcaaatttgtatccgactccccagacggtgacgatttttttcgccgctcccggagacactttgtttaatttttcacggagccgtttgacatgagtgtccaccgttctgaggtctccgaaaaattcatactgccacacttcttttaaaagcttttccctgtcgtacactttgtccggtgttttcgccaggaagtacagcagttcatattccttcggcgtcaggctcacctccgtgccgtccgcagtcaccctgtgagcatcatgatcaatggatagatgcgagaagacgagtacattttttgtcggggtattggctgtcagataagatgtttgggaagcccttcttaaaagcgcctttacccgaagcaccacttctctcgggctgaaaggcttgacgatataatcgtccgtacccgcttcaaacccttggacgcggttggcttcttccccttttgccgtcagcatgataatcggggtcgcttttttttctctgagctgccggcatacttctattccgtccgttcccggcatcattaaatccaagagcaccagatcataatctgatgccagccccattttaatggcctcgtctccgttttccgcttcttcaatcacatagttttcccgttcaaggtacattcttaaaaggcgtcgaattctggcttcatcatctactactaatattttagtttcatttgtttgatccatcgttttccccctgctttccttctgttactttcattttaacaaactgtgcggcagcttgagaactgtatcggctttttgcatctatgcgtacgaatgaagtccggcaagcacgagattcacaaaaattaagttaaacataataatggcgaagccgatgacggcaagccacgcggacttttcgccatgccagcctcttgacagccgcaagtgcaaatacgctgcgtaaaataaaaaggtgatcagcgcccatacttccttcgggtcccagccccaaaaacgcgtccatgcaagctgcgcccaaatcatcgcaaacacaagcgcgccgagtgtgaataccggaaaaccgatggaaacagcgcggtagccgacttcatcgaccaagtccagattcacatttttgacgagcgggcttataagagcgctgattctctttctgaatatcagcctgagcgccccgaataaaacgagacctgcgccaaacgaccagatcaccgtattgacctttctgcctgaaaaaatggccggaagctcaataagcggcttcattgcgccttccgtaagcagttctccgtcatgcgggccgacaagcgcaggcatatcatatatcatcacgcttttagcctcttttttatccacccaattaaattctgctttgtagtccgccagccggaatgccgacgtgacggcgataaatgccacggtcgtcacgagtataaacatgatgacttcaagccagaacgtttttttgcccggtctggattggtcgacatgctttaacaggaaaatgacgccggctacaaaactgatcgcaagaatcgcctgcccgagcgccgcagtcgtgacgtgaatgtacagccaattgctctgcagtgacggaataagcggcgtgatgtctgtcggaaacatgcttgcatatgcgataagcaaaagcgcgatagacaatgtgaacatgcctaatgaaggcagtctgtaaataaagtaaataataataaaagcgagaacaagcatcatgccgaatgacgtcgtaaattcaaacatattgctgacaggcgcatgtccgcttgccgaccatctcgcaataaagtagccgaggtgacaaagaaatccgaaaatggttaacgtgattccgatagccgaccagcggcccttaccgtccttcgcaccttttgttccccggatggcgccgccgaaaaccgggacggcaattaaataaatcaaaaaggcagcataaagaaaatttgcgctcagctccgccatgacaccactcctttttcactaggcctgatttttggccaattctttttgatcggccggctcttgaatcccggtcccgctaagaacaaattcgatatcctttttcagaccgaaccagtttttgttcgtatgtcccgccacaagcacttcatgatcacctgttttgatccagatccttctgtgctgccagtacatcccttgaatgacgccgatcataaagatcgcgccgccgacggcaagcacccataaggttaagtcttttctgacggtgagtcctgtaatgtttttcgtttccacatggtcgaattttaatttgtacttgttactttcggaaccttcaacagtctgctgaatcgcaacaaaacttttctcccctttcggcttgtcgggagccgtgattttaaagacaaaagccggattgttaggaaccttcgtcttcgtgctcggttctccgtctttgttaaaataaaaatcaggaagataactggcaatctgcactttgtaaccgttaccaagatcgtagtccgtgtcgggatcaagaagattgatcttcagtttgccgaatgactgttttgttttttggtcgatcagctgaaataccatctgatcgagctggttttctttatagtccacctgatacacagaataggagtcaaagcgcagcggttcattgacgcggatattgttttctttgactcttttaagcttcggcttttcaccgaatacaatgtcgccttccctcttgtacagaaccgcgtccgttgtgaaggatttggcgactttgccgtttccggctctgtcaatggcgtcggcgaatacttttttctcagtgtctttgttatatgtctgcatcgtgaaccggttgttttttaagtaatatttgccgtctgtaccggggatctgggcggtttcgccttcacggacccagagcgtttcatcgacatacataccgggtacaaatctcagcatggctccgatcagaaaaatgatcaggccgatatgattgacatagggtccccaccttgaaaaacggcctttttccgccaggatgcttccctcttgttctcgcactctataatgcttttttttcaatcgtgttctgaggctatcagccgcatccccgctcagctcggtttctgtccggctgtatagacgctgcctcttcaaaaagaccggattccgccgaactccttgatttttaagcgccctgtacaaaggaatcacccgatccaggctgcagatgaccagtgatatgccaatggatgcgatcaggagcatataccaccatgagccgtacaggtgatgaaaccccagcaaataatacagttggccgattatgccgtactgctgttcataatatgtatccggctgggcgcccggaggcagataagcttcctgcggaaaaaccgtgccgaaagcagacgccgccagagtaatgacgatcagccatattccgacttttacggaagaaaagaagttccataccttatctacgattgttttgttatatgtttgcgaacgccttgcgctgccgtcgtaccgcatatcggcaagcggcgatttttgatcatcaagcggcttcccgcacgactcgcacaaaaccgtcccggctggattcacgtgcccgcactcacatttgacctttttcatgaagacgcctccggcttaattaaattcatatagtcatgaaccatgcgttctgtcatcgtgccggtcaccactttcacgacctttccgtcgggattgatcaaaaatgtcgtcggaataggtgatacgccgtacgcgtccagcacttgccggtcagtatcgagcgcaaccgggaaattgacgccgtatgttttcataaaattatgtactgcaatttttgattcgccgacatttaccgcaaccacctcgacaccgaggtctttaaaatgcttgtattgattctccatgtagggaaattcctgcttgcacggctcacaccacgttccccagaaattcagaaaaacacctttcccttttaactgactcagttctatgagtctgccctctgtatctttcagcgcgaaattcggggctttggacccctcagatatacgctctccgtttgtgtaaacggcattatagatggtatatccgagcgcgcagagtaagatgagaaggatgccggtccgaatgaataaacgccgccgttttttgttcattgtacactgctcccctcccctgtctgcaaatccattcaattatatcatctacacgttttgtaatttttgaaggttatgtgaaaattagaaagcgtttttaccgtgttcagctaaagcccgcagccttttcacctcatgcggcgtcaattctcttgcgtctcctgtgcgcaggcctcttaaatctaaaaatgcgtattcttcacgtttgagtttcagcacgtcatgaccgatcgcctcaaacatgcggcggacctgtctgtttcggccttcatgaatcgtcagctgaataatgctcgtctgctttcttttgtccagggaaagcattttcgctctggccggcgccgtcttgccttcttcaagctgaatgccgcgctcaagctttctcagaagttccttggaaggaatccccttcactttggcgacgtacgtcttatcaatttcgtatttcggatgcatgagtttgttggcaaactcgccgtcatttgtcagcaataaaagtccgctcgtatcataatcaagcctgccgatcggataaatgcgctgcggcacttctttgaaaaagtcggtcaccactttccgccctttgtcgtcatcagctgctgagatcactcctctcggtttataaagcagaaagtacacgggttcttcccgctccacctttaatccgtttacttcaatctgatcagaaccggtcacttttacgccgagctctgttattacttttccattcacctttacttttccttcttttatcagctcttccgcctttctgcgtgatgccacgccggcatgagcaataactttttgcagtctttccatgtcgttcacctcaagtataatcttacttttttccccttgaacaaacaagctttttcaaggagagttattctgatatataaaaagcgcctgatttcaggcgcttccaaataataacgcaactatgatgattgatgcaaccaccccgatcagatcagcaagaagaccgacctttaaagcatcccccatttttttgatgccgaccgccccgaaatacaccgtcaggacatacagcgtcgtatcagtcgatccctgcatgaccgaggccagtctgccgataaatgaatcaggcccgtacacggcgatcagatctgtcgtcatgccgagcgccgccgtccccgaaatcgggcggatcagagcaagcggcacgacttctgcgggaatgccgagcgctgtaaagaaaggcttgcacagccccatgacaaaatccagcgcgcctgaggcccggaatacggtaatcgccaccagcatcccgaccaaatacggaatgatggaaaacgcaatctcaattccttcttttccgccttcaacgaatgattcatacgtcggcacttttttgatcgtgccgtatatcaatataccggcgataataatcggaatcatggctaaagacagccaattcaccatttccattcgcttacctcccttttcttttgcggcggtaccagaagtagcggtcaatgaaaatcgcgccgattcccgaaattaaagtcgctaagatggtcggcccgacgatatcggtcggtgatttcgccgaataagccatgcgcacggcaatgacggttgtcggtatcaatgtaatactcgaagtatttaccgccaaaaaggtaatcatggaacggctggcctcagacttacctccattcagctttttcatctgctccatggctttaatgccgagcggtgtcgccgcatttcccagtccgaaaaagtttgccatgagatttgataagatgtaccccatggccggatgatcagggggaatatcgggaaacagcttagagataaacgggcggcacattctgctgaatatatccaaaaggccggactgctcggctattttcatcaggccgagccagaagacgagcacgctcattaatccgaacgagatcgtaaccgcttcttttgctcctttaaaaacagcttcattcacatcctgcaaggtaccgttaaacatcgcaaagacaagtccgattaccgtcagacatacccagattaaattgaccatgacgaaccgcccgccgcgctcataaacaggctcgtaaacgtctcaatgaaatgctttttcggttttttatggcgctcgttttcataatagacgggaatcttggcgatcactttcccatcatgcataacagtcatccggccgacgacatcaggaatgagagaggcgtcctttttccaggcttttttcggttttattaaggttgtgcggatttttacatcgtcgatttcatcctcttttaataaatatttgacatcccgggcaataaaagcgtgttttccgtaaaacgtctttttcagcttcggaatgccgccttttttagcgacgacataggttttatagtgttcaaagacataattaaacatattcatatggtcatcccagtcatccggatcatttatggtgaccgcgatgagatccgttccgtcttttgaagccgtcgaaacgagcgtccgtttcgcgatttttgtgtaacccgtttttccgcctgtgctgtaacggtagagcccagtcagaagcttgtttttatttttccatacccggtccatcgtttccgccttatacacttttgtgcctgaaacggtccggtattccttgattttcattgcgtatttagtcaaaagcgccatgtcatacgccgttgaatataaattttcatggtcgtccagtccgtgcggattttgaaattttgtattttccatcccgatttgctcggcttttttgttcatcataaatacaaaaccgtcaaggcttccgccgacatattcagctattgccgcagcggcgtcatttcctgatctcagcataagcccgtatacaagatctttcagctttactttttgtcccggctgaagataaatggctgagccttccgtttttacagcattcggggaaaccgtcacggtctcttccatctttcctgattcaatcgccagcaccgccgtcatgattttcgtaatgcttgcaatccgccgcttatgatgttcatccttggcgaataacaccctgccagatgctccgtcgataataatcgcgctttttgcgctgacatgtatttgggcatgtgccgtattgccgtctgtaatggaaaaaagaataacaaaagtcaaaagaaatacggcagcttttttgagaaagcgcatgaatgctcacgtccttgttgtgggtttgtacaagtttatgcgcctgtccatgacttatgaataccaattgcatcactttcacataaaaaaactctcccaaaaggaagagtttttatctgactgatgccatatttgagcctgatgcttcatattgcgccaattcttcccgcatccgcagaaattcactgctgagcgaaagcagaaggctccgcagcgagtccggcacttgctggtagaactcaatcgcgctttggcctgtataagcggcgcggctgttttcgtaccatgtatccttttttggcatgaaaaattcttccacgcactgatgatacactttatacagcgttttttccgctctcacctcatgaaacggctcctgcattaagagccgccggcaggcttcctgggcgccttcgcaaaagacggtcatcctcctcagcacactgagcacgtcgcggcagtatgcctcatccgcctctccttgagcccgcatctccggcaatgttgtatgatttaaatagctgctgaccatcgtgacaacctcggctaaaaattcaccagtttcttcagtatgggccctcacaatcgaatttcccatttccgtccgtttccttcctctcttgtacgtcgtcatttgcgtcattcatcaatggcctttccctactatcgtatgatgaaaaacgattattatttaatatcctcaaaagtttggttgaagttttcaaagaataaatcggcttcctcctggagaacgtcttcctccgcattttcaggaagcggcgggagctcctccaatgtttttaagccgaattgttcaagaaataccggtgtcgtgccgtataaaatcgcccggccgggaccgtcggcgcggcccacctcacacagcagcgcttttgacacgaggctgtgcagaatccgctcagacttcacgccccggatatcttcaatttccgcccgtgtgatcggctgcttgtacgaaacgatcgccagcacttccaaagaagcctgcgacagcccttttgacggcacttcgattagttttttcaaataaggcacgaattcttttttcgttccaagcatatacgtatccgcatattcggtaagctcgatgcctctgtcgtcttccttgtactgagcggccacttcttccatgattccggccagttccgcttcttctatttcaagcaccgtcaccaattgctttttggtcagtccttcatcacccgccgcatacagcagggcttccacaatcgctttccaattcacgatatcaaacgccatgaatggattcactccccgtaatgtatatatctgaaaagttttcttcctgttcaatgataatctgctgatttttcatcagttccaggactgctaaaaacgtcacgacgagatggtccctttgccgagaaggaaaaagctccgtgaagtttattcttctccccgccgtttttaagctttttacgatttctttcattctgtcttcaatcggtatttcctgtcttgtaatggtcgtttctttcggccgcgtgatttttttacgctgaagcaccttttgaaacgcgccgatcatgtcataaacggtcaccgacagtttctgctcggtctgtttgatttcttttgcatactcacttaaatcactcggcggctttgtaaatgacttttgtctttcttcttcccgctcttttaaatccttcgcagcggttttatactttctatactcaatcagcttttcaatcagctcgtcccgagggtcttcttcttcaagcatttcgtcttcaaacagctcttcttcttgtttcggaagcagcattctgcttttaatgctgagaagcgtcgccgccatgaccagatattcactggcgacatcaagttcaagctcttgcattgtatgtacatataataaatattgttcagtaatggttgccacgggtatgtcatatatgtcgatttcaagacggttaatcagatgaagcagcaggtccaatgggccttcaaacgtatcaattttcacttgatattctaccattatctcaccattttcagtatcactctcattgccggaaaaactggctaccctttagtataatccaccgaaatgctctcgtccaatacttttatacacgtcctccgttatttagaaaatactgaaaaagaagatatacgcctatacctttaaaggcggatgcacataggatagccgtgtaaacttgaaacaaagggaggctgatttcacatgagcggagcttgtttcggcggaggttttgcattaattgtcgttctgtttattttgctcgttgtcgtaggagcatcttacatctgctagttcctcaggcttcagacaccaagccgctcttttttccttttcaaagcgctgtggtacactggttttagcataaaaggaggaagcggcttgtatcctaaagcttatatcggctttttggccgaatttcacgcatcaagagattattttgaatgtcatgaactgttagaggaatattggaaagaaagcccggctgaaaagcggagcattcattgggtcggcctgattcagcttgccgtcgctctgtatcaccagcgcaggggaaatgaagccggggcgaaacggctgattgccaacagcttacgtattctccggtctgaaaagcaggcggtctgttctctcggtctcagccatccgaagctgattgagctgatagaaacgctgtcagacgatatagaagcgggcctgccttacagaagtgttatgcttccgattacagatgaagccctgaaagaagcatgtcttgccgaatgccgccgaaagggctatacatgggggcaagacggcgtatcagatacctttcttattcataaacaccgcctgcgggacaggacggatgtcattaaggaacgcgaacgggaaattgagagaagaaaaaaaagcagaggctgacggtcagccctgctttttctatatcaaaacagctcccgaaaccgtgaagattccgggagcatttgtcagttattatatgagatatcctgatctttttgatgttgacagcgttcaaaaaagctttgcgttaattcattcggaacgagtgcctccgttttgaacagacgttttaaggcgtccatcatttgctttccgattccttgatggcggtgagaaggattcacgctgatatgccggatttcaacctctgagtcctttttttcgactccgatcgctccgacgatatcttcatcctctttccaaagaaagagctggcggccagtatccgtttcatagtcctttattgtctgctgaagctgcttgagatctttttcattcggcataaatgacagaagacccatcgcaatcttttcaaacgattttttataacgaattaacataaaaacccctctatatccaaaatgtccattcatgtcctatcaaacggatacataaaggcgatccgttttctcacattatatcattttcgccgcggttttaaacgcttttcaacaaattattcaaatgaacggtttaaatttgccatttcaatggcagatactgcgcaatccgctcccttatttccggcttttgttccggctcgttcgatggcctgctcaatggtttcagtcgtcacgatgccgaagataaccgggacgcccgtcgccgttcccgcctgggcgatgccttttgccgcttcattgcagacatagtcataatgcgttgtcgctcctctgataaccgtgccgagcgtaatgacggcatcgtattttttcgtttccgccattttctttgccgcaaacgggatttcaaacgctcccggcacccaagcgacgtcaatgtcgtttgattctacaccgtggcgaagcagcgtgtcttccgctccgcttaacagcttgctcgttataaattcattaaatctgccgacgacgattccgattttaagtcctgttcctactaggtttccttgtatgatattcatatgttatccatccttttttgtgagatttgtttttagaaatgaagcagatgtccaagttttttcattttggtctgtaaatactgcttgttatgctcactcgcttccatttgaagcggcacccgttccgaaatgctgagaccgtatccttcgaggccggcgattttccgggggttattggttaaaagtttcatatgctgaacccctaagtcgcggagaatctgggcgccgatgccgtagttgcgcagatcaggcagaaagccgagcgcttcgttcgcttcaaccgtgtcgtacccttgttcctgcaatcggtacgccttcagcttattgattaaaccgattcctctgccttcctggcgcaaatacaatagaacgccgcggccttcttcagcaatttgcgcaagcgcggcatgaagctgaggtccgcaatcacagcgatgggatgcaaacacatcgcccgtcaggcattctgagtgcactctgacaagaacgggttcgctgttaaacgggacatcccccatgacaaaggcgagatgttcttttccgtcaacctcgtttgtatatccgtaaactctaaacgtgccgaagtcagtcggcagcgtaatatcaacttctctgttcacaagtgtcgtaatgttgtaacggtactctattaagtcttttatcgtaatcattttcagctggtgacgttcggcgatttcggctaactccggcactctggccattgtgccgtcttcattcataatttcacaaatgacgcccgctccctgagatccgcaggcttttgcaaggtcaacggctgcttccgtatggcccgcccgcttcaggacgcctcctttttttgcgattaaggggaaaatgtggcccggacgctgaaaatcgtcagacacagattcctcgttcaacagcgcctgaatggtaaaagaacgttcttgagcgctgatgcccgtttttgtcagcctgtggtcaatactgaccgtaaaggcggtctcatgtgagtccgtattatgatcgaccatcgggtgaagatccagccggccggcgatgtcttcagacagcggcgtgcagatcagacctctcccatgggtcgccataaaattcaccacttcaggcgtggcatgctcagccagcgctacgaaatctccttcgttttctctgtcttcatcatcgacaacaatgatgacttcaccttttttcagcgcctctaacgcctcttctatcggatgaaacatatcgatcttcctttctaaaagccgttctcgcttaaaaaggcttccgtgatagtttgattgcttttcgtttgttctgttttgtgcaaaaagcggtataagtatttgccgatcatgtcacactcaatatttacggtcgatccgactgttttcgtctgaaaaatcgtttctgagatggtatgcggaatgatggataccgtcacgctttcatctgatagaccgaaaatcgtcaggctcacgccgtctaccgtaattgaacctttcaatacgagcgtttttgtcaattccggcgaaagttttaaatcgtaatagaccgcgttgctttttttctcgatccgcgtaatttccgccgttccgtccacatgccctgatacaaagtggccgccgaaccgtccgttggcggacatcgctctttccaggtttactttactgccttttgacaagccgttcagcgaagtggatttcactgtttccggcatgacatcaaccgtaaattgattgtcagaaaatccggttacggtcaggcagatgccgtttaccgcaatgctgtcgccaagtttcacatcacttgtcacttttgaagcggcgatggttaatgccatggaaaggcctgtcttttcgattgcttggatcgtgcctgtttcttcaacgattcctgtaaacatcgtcaccatcctttccatctttaggtatggccgtcagttttatatccggcccgatttgggtgatttgtgtgaattgcaaatgggggacatctttcattgattgaaaaccttcaccggagatcaagctgggagcaagcgttcctccgattaatttaggggcgaaatagaaatgaagctcttggaaacagccttccttcacaaaacttccgtgtacggatgctccgccttccacataaacggacattattccgttttcagcgagaacactgagcacctcagggatgtgaatgcggtctgtttccagcggaaaaacttttattccgagtgcggtcagccggtctttcttttgcacgtctgcacctttggccgtaaatatccatgtcggcgcagcgccgtcagtgagcacatttgccgtttcaggaatggtcagctttgtatcgagaatcactctgaccggctgcttcaccgcatcaggaagcctgcaggtcaggctcggattatcggctttgactgtgcctgctccgacaagaatgctttgatgcgatttcctgtattgctgggcatcaagccttgccgcctctgatgtaatccatttgctgtcaccggtttcggtcgctgttttcccgtcaaggctcgcggccgctttcaaggtgacatacggaagtccggtccgcatgaagtgaagaaacattttattcagctcttctgcctgctgcctgagaaggccggttttcacttcgatgcccgctgcttccagcattccgatgccttttccggctacaagcggattcggatctttcacagcaatgaacaccctttttatccccgactttattatcagttcggcgcatggcggtgtttttccgtaatggctgcaaggctccagcgtcacatacaaatcggcgccttttgcgtgtctgccggccatattaatcgcgtgaacctcggcatgcgcttctccgtattgcaaatgggcgcccattccgacgatctgtccgtttttgacgacgacagcgccgacaagaggattggactgtgtctgtccttcaccgcgtctggcaagttctattgccgtattcatataatattcatccattgttatccctcccttcttccacgcaatttggcgtcaaaaaagccccgaatgtttacacagttcggggctttgccagttttaatccataggaaataagactatacagtaagtttattttttgcatagcttctctcatccttctcccatccagactttcactgtcggcttcagcttttcactgaatccaccgtatacagatgcatacgggtcacgggctgtaaagcgcaaagcgccttattaccgccggtcgggattttcacccagccccgaaggatacaatcaatatttttttgtccttatccgctattataacatcctttgcggcaggcgcaatgaatttgcacctcattattcagaaaaataaaaagcgcccttttcccataaaaggcgtctttatttattcgttcactttgacgaccttcaataagccgtcaatccggtttgatttgctgaaatacgctttaatcttatcacctttttgcacatcggagagatcctgcttcagcttgtcgccgttaaaaataatttttgtgccgttcgctgccgtaccgtggtactcagttccttcgattttcgtaattttatatgttttgactgtatattcttctttttcctgggacagggtttgtccgattgcagtcggcacgtctttcagttcaatatcgtttatgaccatataaccgcccgctaataacagcagcagtacaagtaaaatggctgcttttgttttaattcttcccatttttctacctccagcccgtatcaatctattcattactatgtcatattcctttttttcatgaatagaaaaccgttcttccctgcgtgagttattcatataacgtttcataaagggaagatgtttcatgtatctgtaaaactttctatctattaaatagatatacgaatttatgttctgtttttgagggtggagagataaatttatataaaaaaagcagttttctcatgaagaaaactgcctgtacggtttatttcgtcttgcgaatttcgttaaacgggaagaagacgaattttgatgtgcccgctatttgtttttttgtaaaaagaccgaggccgttgcggctgtccatagattctctgcggttatcacccatgacgaaatatttgtcgtccggcactttcaccgggccgaagtcttctgtcagccggtcatagccgtcttgcttcgccttgtgcttatttgccgctaaatacggttcggacacttttttgccgttgatatacagctgatcgtttttcatttgcaccgtgtcgccgggaagtccgataatccgtttgacatagtgctcattttctccgttcagcacgacgatctggtcgcgtttgaagtcgcttatgtatttgaccgtcatattgacaaagattctctcgcggtcatgcagcgtcggatccattgatctaccatcaacgagataaggggcaaataaaaagtttcggatgagcagtgccagaacgacagcgatgataatggctttcgcccaatcaagtacggcgctttttttagaagttttttctttttctgatttcaagtgatttcctcccattagccatggtcatttttattttaccatgaatccctgcacagagggcaaataagccccgcaccccatccctttttttcattttataagccggatctgctgattttacggtatttcacgaagcttccgatccgccaaatgcacaaatacacaaaagcaagctccatcgttaaaacggcgaattcagccgcgtcaatgcttttgaaatattggctgagtgcgatacggatcgcaataatcgcgataatgacatatttaaagtttttattccgcttggagtagacaaagccgtcttcccggatttcataggcggtttgcgacagcatgatgataccgaataccgcgcctaacagtccggcgatggcgagctcccaaagagcgggaaaatgaaacggctttcccgggatattcatgagctggctgatactgaatgtaaaaatgacggcgataatcaaaagcgggagaatgatgcctaagccgccgcctttaatcggcctgtttcccttttttaccctgaaccaaatcataagtgcgagaatgataatgacaaataaaacggttgccaattgaaccaacgtttctacctcttttcattgttgtaatcggtctttttcactataccagaatgatcaccgatgttcatatatgtattttttcatgatttacacatgagaattttcatatacataaaaaaaacccgcctgaaaaaggcgggttttccgtcattatccttctacacggatttctttcattttgtctccgttagacatgtttttcgcatgctctaaaccgcttgtcacttttccgaatacagtatgaacgccgtttaaatgcggctgcggctcatgtacgatgaagaattggcttgaacccgtgtctttaccggcatgcgccattgataaagaaccggcttcgtgtttatgcggattgccttctgtttcacatttgatcgtttttccgcttccgcccatgcctgtcccagtcggatctccgccttggctgacaaagcccggaatcacgcggtggaaaataacgccgtcataaaagcccgtattcgccagattttcaaagttagcgactgtattaggcgcttcattcggataaagttcaaattcgattctgctgccgttttccatttcgatgtaaccagttttcattctcattcctacttccgtattgttttttgtcaaagccttctttaatatgaatttcaattgtaagccggctttctttttgatattcttttgaaggaagaggcctctgctcttcttttcgcggctattataccacaccttcagccggaaaacgaatctccccgcttccgcagaaagaaaatgaaaccagaacagcttcacagccgtctatgtatcggaactgcttctcgcaggtcctcacaaaccgcttcaaaacggcatttgtgaaaagaaggaggttaaccgctttgaaaaaaatgtggattggattgctggcggcggccgttgtattgtgcacaataccgaaaatcagcctggccgatgccgcagtcggagatgtcatcgtcacactgggggcggatctgtcaaacgaaaaccgtcagaaagtgcttgacgaattaaatgtccctgataacgcgacaaaagtgacggtcacaaataaagaagaacatgaatatctgggaaaatatatatcgaatgcccaaatcggcacaagagccatctcttcgtcatccattacggtggcaaagaaagggtccgggcttgacgttaagacccataatatcgattccattacggatgaaatgtacttaaacgccctgatgacagcaggagtgaaagatgcgaaagtatacgtgacggcgccgtttgaggtatcaggcaccgcagcattaacgggaatcatcaaggcatatgaagtctcatcagacaaagcgatttcagaagatgtaaaacaggtcgccaaccaagagcttgtcaccacttcaaatctcggggataaaatcggggataaaaacgcctccgcgcttatcgcaaacattaaagatgatttcgcgaaaaacggtgtgcccgatacaaaagaaggaatcgagaaaaaggtcgatgatgcggcttcaaaccttaacattacactgactgacgctcaaaaagaccagctcgtttcattgtttaataaaatgaaaaatgcaaagattgattggggccaagtcggcagccagctcgataaggcaaaagacaaaatcacgaagttcattcaatccgatgaaggcaaaagctttgttcaaaaagttattgatttcttcgcttcgatttggaatgcgatcgtgtctgtatttacaggagacagcggatcaagttctgacagctgaacgcaaaaagagaccggacgccattgttccggtctcttttttatttattgtttgaccccagtcttaaacggcagatccagttttacaatgtcttcataagtttctcttctaatgacaagatgcgcttcgccgtcttccacaaaaacgacggcgggacgcggaatacggttgtagttgttagccatgctgtatccgtacgctcccgtgcagaaaacggcgagaagatcgccttctttcacttccggaaggtctatatcccaaatgagcatatccccgctttcacagcacttacccgcgatggataccgttttgtcgtggtgttctccgattctgtttgccgatacggcttcatatttcgcctgataaagcgcaggacggatattatcgctcatgcccccgtcaaccgctgcatatttacgggtgccgggcacttctttttgcgaaccgatggtataaagcgtcgttccggcatctccgacgagcgagcgtcccggttcaatccagatctccggaatgtcaaaagcgtgcagcgctgcgttttcttttaccgcttcgataattttttccacataaacggcgggatgaaggggttcatcctcttccgtgtagcggatgccgaagccgccccctaaattcagcacttcagagacaaagccgaatgattctctccattcattcagttttgcaaagattttttctgcggccagcacaaagcccgccgtatcaaaaatttgcgatccgatgtggcagtgaacgccgagaaggcggatatggtctgactgcaatacttgttcaatcgccttttctatttgcccgttatgcagatcaaaaccgaatttggaatcttcctgccccgttgtaatataatcatgcgtatgggcctctacccccggagtgatccggagaagcacatccattgtgcgccctgatttgcggcacagttccgcgagtaaggatatttcataaaaattatcaacgacgatgcagccgatttgatgatcgagcgccattttcaactcttctttgcttttgttgttgccgtgaaaatgaatcctgtcagccggaaaaccagccgcaaccgccgtaaacagctctccgccggatacaacgtccaatgagagcccctcctgctcagcgagctgtatcatcgcaacggaagaaaacgccttgctcgcgtacgcgacctgcgcctttaaatccgcgtcaatgaatgcctgtttaaagcttttagcgcgctcacgtattaaagccacatcgtaaacataaagaggcgtgccgtaatgctccgctaaatacagcgcgtccacacctccgatttccaaatgacctagtttgttttgtctgcttgtgccatgtaagaacaatgctcattccctctttctgatccgcctatgggtgaaaaggacagcttcttttgagctgtccttatacaagtcccgtataagttaagacatacaatatcataatcttctgtcggtttcaatgcgattatgaaccgcttggctgtctttgacggtctttcgggtgaacaatgctcggtctgactttcgctcccggcactgtcgtccggacgagcacctgccacagcgccttgccgttaaacggtaaaaacggccataaatacggcgtatgaaacgaacggatattcgccattatgatcagcagcaatgtaaagcctatcacaaagcctttcacttggaaaatggccacgagcaccattaagatgaggcgtatcattttattggcgaggctgagctcataactcggcgtggtaaatgatccgatggcggcgatcgatacatacagaatcacttctgctgaaaacagccccaccgctatggcgatttgaccgatcagcaccgccgcaatcagacccatggcggtggataaagcggtcggcgtatggatcgcggccatcctgagaaactcaatccccaaatcggctaaaaagatttgcagaatgatcgggatgtgcgtatttttatttaaaccgataaaatccaatctttcaggcagaagagacggttcgagaacaaagagaaaccagatcggaagcagaaccgttgaagcgataataccgaagaacctgatccatcttaaaaatgttcccactgaaggcgcctgcctgtattcttccgcatgctgaacatggtgaaaaatcgttgtcggcgttatgatcacgctcggtgacgtatcaacgacgatgatgacgtgcccttccaaaatgtgattggcggccacatccggccgctccgtgtatctgaccatcggaaacgggttgtagccctgtttgacgatgaattcttccactgttttatcagacatcgtcaatccgtcaatgtcaatcgcattcacttcgttttcgacgatgctgacaaggtccgggtccgcgatgtcttctatatacacaatggcaagatcggtcttagagcgctcgccgactttcgtaattttgacgcggagcctttcgtctctgattcgtcttctgatcaatgctgtattaatgacgatattttcgataaaaccgtctcttgccccgcggacgaccttttccgtatccggttcttccggtgtgcgtccggggtaacttctgacgtcaacgataaaggcgaagcccgcgtcttcaacgataacggccacaagtccggaaagcacttgatctgttgcttcgtcgagcgttttgactttttggacctgctgattgacaagcctgttttcaacaacgtcaatcgcttcatccgcattctcatcataattattgacgtcgacgagctgttccattaaatgaatgataaacaaagtatcggttaatccgttgacaaagtaaatctggacttcccggtctaatactcgaactttgcggacgccgacatcatagctcgttcccataccgacgcggtctttaaaaaattgttcattttttctaggatcccggtataccttgatcatgttttccggtttttccggcatgactttcgctcctttctaaaatgaattcgaccgccttcatcgtaatcggcgagcctttggatatgtcatcttttctccccatctttcctatgtcgccgatgcccacaatgagaggaacgtccaatttatccagacaatacaccgtatctccgttcattctgtgctcgtccatttctctcattccggttttatcgacgccatactccgtcacttctccatcacggtcaatggagacatcgactttcgtccattcagcctgatgggtcttagaagcgaccgcaatcacccccagcacttcaatgtcctgatgtgaggcgacatatttcagcgccgtttcgcccggcccttccccttgcaggcctgaatcgtcaaacatgacaaacaccgggtcattcggcgcggctttaatcagctgaacaagttcggggccgcttctggttgacggattgccctttgattgggaaatacaccgcccgcctgctttttccgcggcatattcaattgttttggcggcgtatacgtccccgtctgtcacaagaatgaccttccgtttcgtcatcaggcattatcctttcggtttaaaaataatggctacaagaaatgcgaataaaatcgctgaagatataccggcggaagtaagttcaaaaatccccatggcgatcccgataaatccatgctcgtgagcttgatgcatggcgccgtgcaataagctgtgaccgaagctgacaatgggaaccgtcgcgcccgcacctgcaaattcgataaatttgtcatatattccgaacccatccaacaaggcgccgatgacgacaaaagttgtcatcacatgggcgggtgtcagtttaaaaatgtcaagcagcagctgaccgataatgcatatgattcccccgcaaacaaaagccaacagatattccatttatgatgcacctcccgcccgctcaaataccacaccgtgcgcgatggtcggaatggtttctttctgctggatcattgtcggacttaaaagcgctcctgtcgcgacaacgagcaccctgttcagagcccctgattttaattgattaaaaatatgtgtgtacgtaacaagcgcggagcaggcgcagccgcttccgcccgcaaacacctgctggtccggcgtatagatgagaagaccgcagtcatcgtgtttcgttccggcgggatagccttcttctttgagcaaatctttcacgatcggcgagccgacgcctgaaaggtctcccgttaaaatcagatcataatcatccgccgtgcggtttaagtcctgcaggtgctgtttgattgtgtcggcggcagcgggcgccatggcggatcccatatcgaacgggtccgtaatcccgaggtcgcttacttttcccactgttgcgcttgtaatcttgatatcagaagggttttggctgatgatgaccgccccgccccccgtgaccgttgaagtggcggtatccggtttttgcccgccatactccgtcggattgcggaattgccgttctgccgtcgcgttatggctgctcgtggctgcgatcgcccggttcgcaaaaccgccgtcaatgagcgcggatgcgacggcaatcgtttccattgatgtcgaacaggcgccgaacagacagaggaacggaattttcagatgtctggcgacgtagttggcggtcacattttgatttaaaagatccccgcgagtaacaaatcaatatcgctctttttcaaattctgtttttgcaaagctgagttgatggcatcttccattaactgacgttccgccatttcccagtttttctgattgcaatgcatttcatcgtatgtcttatcaaacagcgaaccgagcgggccgtctttttctttcggtccggctgccgtccccgccgcatttacaaataacgggttttcaaacacccaggtttgctttccggttaatttcattttttctcctcctacgaaaacagtttttcacaagcaaaccgtatcaggcctacgatataggctgccacgacgccgaatacaatgacgtttcccgccaatttaaacatgtttgtcgctactccgagcacgagtccttcacttctgtgttccagagccgcgcttgtcatactgtttgcaaaacccgtcaccggcacggctgaacccgctccggcaaactgcccgagtctgtcataaatgccgaatccggtcaaaagggcggaaattaaaataagagtggcggccgtcgggttgcccgctgttttttcattaaaattaaaaaagtggatgtaaaagtcttgaagagcctgtccgatcagacagatcaaaccgccgatcagaaaggctttgacgcaattccaaacatatggcggtttcggctgatagtctttcacttttgttttgtaattttcttttaagtttgtcacgtcggttcctccttatgaatgatggataaaatacagccaatgaaataaagagccggctattttgccgaacacaatggccatcagcaatataatgattttgctgccgaagccgatccgtttggcaagaatgggaagcacattcagcacttctgtaagcgcggcggccagcatgccgataaacatgccggccaaaagcccgaccggaacggccagccattcagataaaaaaaaatgattcatatttaaggtttcccagccgccgaacacagctcctgaaataactgctccttcgtaggcctgtacaaagcgcattgtttttgtcagctgcataaggcgggggacgattcccataacggttaaaaaagccacaaagcccgcgcccacggtcagccctccgccaagcccgacaaatacaacgaaaagaatgctaacgatcatgcagatctttcatcgtctcttcattttcgtgcattgcgacataatgatcgagatcaagctgataattaaacatctcgacttccagcgggcttggctcttcattcaggcgttttttgaagatgtgattaaaaaagacgatcataccgagaccgaggccgatgctgtatggaatctgaagcagatacgggtattcattccgttcgcccgttatgatttcatataaggcgatatgaacttctctcatactgacatcttcatgaaaattcataatggcaagacatgaaccgataaaaagcaggagccagacaccgacgaataaaacggctgacagctgctttttctggtaatggatttccactatcgtttcagcgccgccgacggcctgtacatcaagcgcgggaaaagcggtatgaatggttttcagcacttttatgatgtccagcacgacgatatttttgtcttttttcgtgaccttatacagcggcagtgccgacagtttttttttcagcttttgctgtcccgcaatctgcgcggcgtcgccgactgtgatgatatctccggtatgagccttcacgcggtggcgaagtctgagaaatattcgtctttccatcttgcatcaccatctttcgggtggttatatatgtagtatgtggttcacttttgttctcattcatcagccgcaaaagaccataaattaccaccgatgcacaaataaaaaaagccggcccgtaaaaggtcagctttccgtatgatccatctgcactttaatctgctttaatatttttttctccagcctcgatacctggacttgggaaatcccgagccgttcggctacttccgactgtgtctgatctttataatatctcagatagacaatgagtttttcccgttcttccaaatcactgatcgcttccttgagggcgattttgtcaaaccacttctcttctgaatgatcggcgatctgatcaagcagggtgatcgggtctccgtcattttcatacacggtctcatgaatggatgaaggcgcccgcaccgcttcctgcgcaagcaccacatcctccgcatcaatttctaaatgatccgcgatttcctggacggtcggcactcttccgtatgtttttgacagttcatctttcgcccggcgtattttattgccgagctcttttaaagatcttgatactttgacggttccgtcatcacggatgaagcgctggatttctccgataatcatcggcacggcataagttgaaaaacggacatcataggacaaatcgaatttatcaacggattttaataatccgatacagccgatctgaaacagatcgtccggctcatagcctctgtttaaaaacctttgaacgacggaccacacaagacgcatgtttttttctatgaggaggtctcttgcctgctggtcgccctcttggctctttttgattaattctttgacttcatggtccttgagctgcgcgtttttgctgtttttcttaacctccacatccataacaaatctccttaattacaaagcgctttgctttttgataggtgttttgttaagcgtatcgtcgttcccatctccggcgaggaatcaatcgtgacatcatccataaagttttccataatggtaaagcccattccggagcgctcaagctcgggttttgtcgtaaagagcggctggcgcgcttcctcaagatccgtgatcccgaggccttcatcacgtatggtcagatagacgacatgatcctccagcgtaacggagatgtacacctttccgtcgcagttttcttcatagccgtggatgattgcgtttgttaccgcttctgatacgacggtcttgatttccgtcagctcatccatcgtcgggtcaagctgcgcgataaaagaagcaaccgttacgcgcgcaaacgattcgttctgactgagggctgaaaattcaagatgcatctcgtttttcatgaagccacccccaacgttaaaagcgctttttgttccgattgttcgaacctgatgattttaaacaggccggacatgtcaaacagacgtctcaccgctggcgaaatcgcgcacacgaccatttctccgccgagctgtttaatttgtttataacgccctaaaatcacgccgaggccggagctgtccatgaaggtaagatcttcaaggttcagcacaatgtgacggatgctgtcagcctccagcgattcagtaaccttttgttttaatgattctgccgtatgatggtcgagttcacctgttaatcgaatacaaagcacggattctttgacatgaaagtcaattccaaggctcatgctcattcctccttgtatgatcggataatgagtgtttcgattttcgggaaagcaattccttcactatgacaaaactagtgcccgttcgccatgattatttaaattttgtccaatctcccatcgtccgcttcagaaaagtgagaaaacccgctttttccatgtcgtcttttgccgtgaccgggctttcaacgagcacctttccgtcttttttcagaacgaggctgccgagcacctctccttttttaaccggagccgttacattgccgttgattttcacttctttttttactttgtccatgttctctccctttttggccagaagagaaatcggctcagatgtggtcagcttgatcagtttctgttttccttttttcacttttaccgttccgacgatttgattccgtttgtacagcgggtgtgttttgaactggctgaaggcgtaatcaagcattttggtcacttgggcgtttctttctttcggggtgctggctccgaaaacgacagcaatgaccctcatattcccttttttagcggtggcggttaaacaatacttcgcttcgcctgtaaagcccgtcttcacgccgtctacacccgggtaaaatttgatcagccggtttgtattgacgagccagaactttttgtctgtattttctcttaaataatcctcatacgttcccgtaaattgagtgattttatcgtactttaataattccttcgccattttcgccatgtcataagcagagctgtaatggtctttttcaggcagtcctgtcgggtttttgaaggaggtatctttcaatcccaattcttttgcttttttgttcatccggctgacgaaatcctcttctgaaccggcgatatactccgccattgcgacagatgcgtcatttccggaagctatcgcaattcctttgagcatttcttttaccgtcatttcttctccgggttcaaggaaaatctgtgatccgcccatggacgcggcgtgttcactcgtcctgactttatcgctcatctttattttccctttgtcaagcgcttccatgattaaaagcatggtcatgatttttgtcatgcttgccggcgccagacgctcccggctgttcttgttataaagaatgcttcccgtatcgcgttcaatcagcacggcgcttttggcttcatgagcgagctccgatgtatgttttccgtccggctttgcaaaagcggacggtgctgatgccgttaataaaatgccaatcaacaaagtggatataagacgtttcatctccaaagccctccatttcataatcctttttattttttccaaatccggtggttttatacgcctcatctggaaaatgtttcgtgttgagggcacaaaaaaacagctgcttccgaagaaacagctgacttatgctgacttatttttgagatcgtgcgactacggctttgacaagcttcaaaaagccgccttttactttttccgtcatttccattacttcttcatgagataacggctggtcaagaatacccgccgccgcgttggaaatgcatgagatgccgagcacgcgtatccccgcgtggttggcgacgatgacttccggcacggtcgacatgccgacagcgtcagaccccatcgttcttaaaaaccgaacctcagcaggtgtttcgtaagacggccccgtaacagctgtatacacacctttttgaacaggaatgcccagctcatcggccgttttttcagccaagcttgacagctctttgtcataggcttctgacatgtccgggaatctcgctccgaattcagcttcgttcggcccgattaacgggttggtgcctgtaaagttgatatggtctgtaataatcatcagatcgccggcgcggaattcagtgttgataccgccggctgcattcgtcacgacgagagattcaacgccgagcgctttcatcacgcggactggaaatgtgacctgatccattgagtagccttcatagtaatgaaagcggccctgcatcgcgatgacctgcacgccttcaagcgttcccatcacaagctggccggcatggccttctaccgttgagaccggaaaatcagggatcgtttcatatgtaagcttgacagctccttcaatttcatcggccaatacgccgagccctgaccctaaaatcagaccgatctttggtgtttctttcacgtgttctttaataaatgcagcagcacgttcgatcttttgtttcaaaaaaagtccccctactgtaatcttgataaaaagctttttccgtattccggcttttccgttttaaaattatcggcaatagttgcgccgatatcggcaaatgtatccgcaagcggcagctgttctgtatgtttgtgctttttgctgtaaacaagaagcggcacatactcccgcgtgtgatccgtgccgtgatggacaggatcattgccgtgatccgcagtgataataagcagatcgtcttctttcattttttcaaacacttccggaagcctcgcgtcgaattcctcaagcgcttttccgtacccttccggatcgcggcggtgtccgtacagcgcgtcaaaatcaacgaggttggcaaagctcaggcccgtaaactcttcaccgagcgtttcaatcactttgtccatgccatccatattagataccgtgcggcgggaagatgtaatgccttctccgtcataaatatcagaaattttgccgatggaaatgacgtctaatccgctgtctttcattccgttcattaccgtgcggccgaacggtttgagcgcataatcatgacggttcggcgtgcgtttgaagctgcccggctctccgacgaacggtcttgcgataatccggccgaccatgtacttcggatcaagcgtcagttctctggccgtttcacagatgctgtacagctcttccagcggaacgacatcttcgtgagccgcaatctgcagcacggaatctgctgatgtgtaaacgatcagcgcacccgtttccatatgttcttttccgagctcgtccagaatcgccgtgcctgaagccggcttatttccgatgattttccgtcctgaacgccgctcaagttcctgaagaagttcatccgggaatccttccgggaacactttaaacggtttttcaatgtagaggcccataatctcccagtgccccgtcatcgtatctttcccgtttgacgcctcctgcatttttccgtagtacgcaagagggtgctccgttttttccacgcccttaatgtctccgatcagtccgagaccgagctgcgccatatggggcatatgtaagccgttcatgtgctctgcgatatgtccgagcgtatttgcgcctatatcattaaaatcggcggcgtccggcgcttcaccgattccgacagaatccattacaattaaaaatacccggttatatttgtattcagacatcataaaagcctccttttcttccatctgtccattgtagcttacagaggtcagacaactcaagtataaaccgtttacattcttgttgacaatgccgattcaaataattagaaccttctctgtattccgccaatccggcaaaaaaagccgcggcccctctggcagcggctcctaagctcgcggatgatactgtttgtacacgtccttcagccttgttttcgtcacatgcgtataaatttgtgtcgtggaaatatcggcatgtccgagcatctcctgcacggcgcgcagatccgcgccgttttcgagcaggtgcgttgcaaaagagtgccggagcgtgtgcggtgtcagctcttttttaatccccgcttcaagggcgatttttttcaggtttttccagaatccctgacggctgatctgcctgccgtgatgattcagaaaaagcgcttcggttacgtttttctttaataatttccctctggctttttcaatgtatgcttctatcgcatgggaagcggcttcaccaatcggcacaatccgctctttccgcccttttccgaagcagcggacaaatcccatcgtcaaatggacgtcggataatttcagctcgatcatctcgctgacccggatgccggttgcgtacagcagttcaagcatggctttatccctgagaccgaacgggctgtcaagcttaggcgtgtccaataaccgctcaacttcgtgaagcgccaatactttcggaagcgtccgctctgttttttgtgtttcaatatgtaccgaaggatctttatccgcggctttttcccttaacagaaattgatgaaaagaccggatcgacgccaaatgcctggcagacgtcttgccggatttcccggagtcctttatatgctttaaatattgaataatatgaagacgggtcacatcattccatgaagtgatctgaagggtttcagttaagaagagagaataacttttcagatcacgctcataggacatcatcgtatttagggacagccctctttcaaccctcacataatggatgaaatccttaatttgatccttcactcttgatctactccccgttttggtaaaaaaagatcaatcggccgaaccagccgtctttctcctcatgttccgttttggccactttgacggcggagccttccggtttatcgtaccgatgatagttttcatactctgaattcacccatatcatagcataatagaacagcgcggtaaaacctgtgaacagaataaacactttgatcgtatccgcggctgttttcaggaatctgcccatctttcgatcgaccctttctttggcggctgttagtacaccttatgccaatttcaaaggcttttatacataaaaacagcaaaaaaccctttcctggcagaaaaggttcataggcttttactctgtttcatccccgcggcagcggtggcagattccgtgaaaagtcaatctatgatctttaattttaaatttccaatcacgttcaatcacttcttcaacgtcttcaagcagatcttcttcaatttcatcgacggctccgcactccatgcacaccaaatggtgatgaaaatgagccgcgccctctttgcgaaggtcgtagcgggatacgccgtccccgaagttaattttatcaacgacttttaattctgttaataattctaatgtacggtatactgtagcgagaccaatttcaggagatttctcttttacgaggaggtatacatcttctgcgcttaaatggtcttcttcgttttcaagcagcactcttaccgttgcttcccgctgtggcgtaagcttgtagcttgacgagtgcagctgctttttaattcgatcaatacggttttccatgtctttccctcctacgccgcattccatgactcattataacaaaatacgcgcagagttccaactataattattataaactgataaataaaagtattattttgtgataataattctaaaatatgcgtgatgacagcttttccataaacagcggagacatgtacgcttcgagcagtgaagcgaggaccgagaagaaaacgatgagaatcagtacgaaggcgtagcgtccgaaccattggatcggcgcgtcatgaaggctgcgtttgacaaacagctgccggatcagtttcagtgaaaaagcgatggagcatgtccccatgataagatatgctggaatgagaacgatgttttgcggcagaaccgaaataaatgacaggaaaaacccgttcatccccatttgattcactaaaaaaccgaccgtgaagccgacgacgattccttttaagaacaccataatgaaaataaccggaagaccgatcacggaaataccgagaatccacatcagccccaaatattttacatcatgaaagacggcctgccaaaacatttctgaagcgccggcatgttttccgtcagacagctgtccgaaaaacttgcttaaatagtaatacaaatcttctttctgcgtgatggtcatgctgttgacgatgatcgccccgaaaatgacccccatcaaaaacaagacgaacacaaatatataaagtgacagatgatcctttacatggcgaaaaaacagttctttgtacgattgttttctcataccgctttcctcccgctaatctattgacttgatttagtagattgtatgaaagaaaagagaaaacatgacagagaaatcatagaaaggcgcgagattcgggcataaaaaaagaacccccgtcatcactccggtgatcataggggttcctttttttatgctttattctttcaagcctgtcttttttagttttcgtcactctttcatgggtgctgaaaggcggcgccgtcccccttgacaagactgcgtcacgcatcccgtttcttctgagatgctcccgcatttttttcgttttgctcttcgccatgtgccaatcgctcctttttgccttttctttatcataacaaaaaaatcccgatgtgttcatgaatacggctcatgtttcgaccggtaagcgcgcagagacgttttggcagatgaatagctccccatagcggcgtatccgtaaaaaaatcccatgaaaatccccgcatacacgtgttcatggtgaccgaaaacgatagacacaacatttccggcagcaagggcaatcgtgggaacgaatatgcccggaacccggcagaacactttgatcagctgtgtaacgcataagacgaccggcacgccgatcacagcatcccaaatatttgtatggatcagcggaaaataatccacattgacacctctttattccgtcttttgctatctgttagcctgcctaagaattccgtttcctattcatctaaaaaaacagcaccggcacatgtccggtactgtaagagttgtttattttcctgccgcggcccgttctacggctgctgatacagcctgatgcacgtccgcatccaaaggctgaggcacgagatcgccgtgttttgtgcaagaggcgatggcttctgcggccgccacaagcatttcatggtcgattttcttgcttttggcgttcagcgcgccgcggaaaatccccgggaagccgagaacattattgaccgagcggccgtcggctgcataagcggctccggcttgtaatgcgtcttccggttcaatctccggcttcggattagataaggccagaatgacatgtccttttctgacatcctcttttttaatgagacccggaactccggtggtgctgatcacaatgtcacacgtgtccattaaatctttgatgcttccaagcggctgacctccgtactgagcgaggcggttcattgcgtcttctgacttgtccgttccgcagaccgctttgactccgtatgccataaacatccggcagatggcgacgcctgccgcgccgagaccgatctgtccgaccttcgcttcttttaaatcaagaccggcgcttttacaagcggaaatggcggcggcgagcgtgacgaccgccgtgccgtgctgatcatcgtgcataaccggaatatccagttcttctttcaggcggtcttcaatgtcaaagcagtgaggcgaaccgatatcttcaagcagtattccgctgaaccccggagaaatatgttttaccgtgcgaataatttcttccggatcagaggtatcaagcaaaatcggaattccgctgatacccgccagctggtcaaaaagcgcggctttcccttccattacaggcattccggcgacagaaccgatattgccgaggccgagaatcgccgtgccgtcggtgacaatggcgacagaattgctgattgtcgtatagatggacgctttttcaggctcgttttcaatcagtcggcacacatcggcgacgcccggtgtataaacacggccaagctcagccaatgtccggatcggcattttgcttttcatttgaattttgccgccttcatgagcagagagcacttcatctgagactgtatgaagccggatgccttcaccgagagcttcaatggcttgaatgatttcctgcagctgctcctcattttcggcctgcaccgtgatgttgcgcattgtgtagttcgggccgactttaacggtttcaacttccccgatatctccgcccatcactccgatggcggttgccacttttccgagatttccgggaacagtcggcgtttcaatcattaacgtccgaatcatatgctttgtaatcatgaaatgaacctcctaacccaatttttgagattgcaaggatttttctttcgtgtaccaaatgaatttccccgtgtatccgtacaatattgccagtccgatagatacaaaactgagccacatgaacggcagatatgaaaatgtggatacgccgagaatgccggccatatagatgccgttatcagaccacggcaccatccctgaagtaagcgttccgcccacctctgcgttccgggataaaactcttctgtcaagtttcagtttatcataactgttctccatgattttcggcgtcaggatcaatgacacgtacatcgcacagccgaaaatgtttcctaaaagggcgacgatcaatgtcgaaagcgtcacatttcccggtgtggtcagctttttctcaaaagttgagacaatcacttttaatacgccgagcttctcaagaattcctccaaaaccgagaccgaacaggataacgactaacgtatccagcataccggtaatgcctccgcggtttaacaggccgtttaaaaattcgacgtccgttttaatagaaaaaccattataagcagtcgcgatggcactggcaaaattcattccctgaaagacggaagcccagattgcgccaagcaaagcaccgatgataataacgggcatagacggctttttcaaaatcagaaggacaacgacgacaacagccggaatgagcatccatatatgaatatcaaacgttttctgcaatgaagattttaaaaattccactttgtcgagatcaatattttttccgccgtatataaatcccgttacggtaaatagaatggccgtaataatataggacggaattgacagatacatcatcgctctgacgtgcgacagcacatccaccttagaaagcgtggaggcaagcaccgtactgtcagacagcggtgaaagcttgtctccgaagtaagcgccggacaaaacggctcccgctacgatcggaagcggtatacccattccctctccgatggcaatcatggcgatccccgcggttcccacggttccccacgatgttccggtcgcaacggacataacggaacaaataaccagtgtagccagaaggaaaatatgaggattaataaactctaaaccataataaattaacgtcggcacaacaccgccggcaatccatgtcccgatgagcgcaccgaccgaaacgagaatcaacaccgcttcaagaccgtttgatatcccggtgacaatcgaatcctgcaagtctttatatgaatatcccagcctgactccgagaataatagcgaaaaaccaggatattaatagagctagctggatcggcaggtctaaaaacactgtgaacgataagacaagtgctaaaaacccgaataataagataataatttccaataaatttggcaatctgacctctttcacaagaaaatccccctagaagaaaaaagctaaaacgctttcatcaaatgatataacaaattatactatactgcctcatccctttgtatggcaaccgcctattcactgaaaaacgtgaaaaggcggctgttgttgctttaaaatttatttttctaatagatcttttccggcaatccccggttttgtcatttcatacggattcaaaatgatatccaattcttcttctgtcagtacatcattttgaaggcaaagatctcttacagattgccccgtcatgatggcttcacgggcaattcgcgcagccgcttcatagccgaggtgcggattgaccgctgtaatgacgccgacgcttttttccacgtattgcttcagacgtttttcgttggcttcaattcccgccagacaatgatcggtaaatgaacggaacccgttattcatgatgctgatggattgaagcaggttaaatacgagtaccggctccattacgttaagctccagctggcccgcttctgaagcgaggcagatcgtattgtcattcccgatgacctggaaggcgatttggttgatcagctctgccattacagggttgactttcccaggcataatggatgatcccggctgacgggcgggcagtgaaatttccgcaagtcccgcgcgcggacctgaagccattaagcgcagatcgttggcgattttagacatgttcatcatgcatactttcaacgcggctgaaacttccgtatacgcatcagtgttttgtgtggcgtcaaccaaatggccggcgccgacaagcggcagtccgctgatgtcagccaggtgctttacaacctgttctatgtagcgcggatcggcattaagccccgtccctacggccgttgcccccatgttgacttcatacagatgctggcgggattgtttaattcgctttatgtcacgctcgagcacgcggctgtatgcttcaaattcctgtccgagacggatcggcacagcgtcctgaaggtgtgtgcgccccattttaatgacagaatcaaattgtttcgctttatccttaaagacactcagcatatgcgccatcgtatcaaggagcttatccaaaagttttaaggtggaaatatggattgccgtcgggaacacgtcgttcgtcgattgggacatgttgacgtgtgtgttcgggctgaggtgaatgtattcaccttttttatggcccatgatttcaagggccctgttgccgattacttcgttggcattcatgttcatggacgttccggctcccccttggatcggatcgacgatgaattggtcatgccatttcccctcaagaatctcgtctgcggcctggacaatcgcatttccgattccttcatacagccgttttacatccatgttggcaagcgccgccgcttttttgacgatggcgagcgcattaatcatctcttcgtggatgcggtagccggtaatcggaaagttttctttcgcgcgcagcgtttgtattccgtaatacacatcagcttcaatttgtttttctccgaggaaatctttttcctgacgatattctttttgcgcgtttgtcatgctaaaaccctactttctctttgtggtagtcatgtttttacagtacaacgtcgtctgcgatcggtgtctccataatgtttttgacttcagccaagttgtgagactggccgagcgcccacattaatttcggcacgatggcttccgtgttcatatttctggagcggataatgagatcttgattgactcttcggccgacttcatagacgctcatgtcctctccttcttcaagacattgtgtcgtaatgacgacgacaatgccgctttcaatcatttcattgactttggcgagaatgtctcttccttcaaacggcacgccgccgctgccgtagctttcaatgacgatccctttgtacatgccctttaatgcgtcaaacatttccggtttcagccccgggtggagcttgagcaggcacacgtccgtgcaaagtgaggtattgaccgtaaaggcatcgtcttttggcatgtgcacttgtttgttgtattcaattccgttttcggtaataaacgcgatatacggatagttaatgctctcaaatgcatcatagcttttcgttcttaatttaatggcgcgtgtgccttgaatgactctgccgtcaaatacgacgtatacgccgcccaccccttcacatgcgaagcggatcgcgtccgtgatattttttttggcatcggttttttgaaatgtaatcggaatttgcgaacccgtaatgacgatcggtttatcagcatgctgaagcatataagacagtgccgctgatgtatacgccattgtgtctgtcccgtgcgtaatgacgaacccgtcatatgcgtcatatttttctttgacagcatttgcgatttcggcccagtattcaggctgcatatttgtgctgtcgatgttcattaacgaatgggtttccatcgtgtaatcgttatcaagttttgatacgtaggttaacaattcgtctgctttcaccccgggtgcaagcccgttttctccttcgactgaggcgattgttcctccggttgttaacagcaataattttttcataccctgcacctcttcatccatttctcaagatgtgttaagcattcgcttttcgcatacttttaatcaaattatagacagacgattgaaattaatcaagtgattattattcaattcgcgtacacttttgcatatcgatatgatataatttgctcaagtgaaaaggagcggttttgaatatgaatttagatcgtttaactgaactgagaaaaaagaaaaattggtctcttcaatatacggctgaccgtctcggcatcgccaaaagcacgtacgccgggtatgaatcaggataccggcgtccgtcattcgaagcgctgggcacgcttgccgatctgtttgacacgacgtgcgacgatttactggggcgcactgaaaaaaaggcggagccgtttacccagaccatcgaattaacaaacgccgcacaaggccgcggcacactgaccgttgacggacagccgctgaatcaggatgaaatcatcgaattgattgcgtttgtccgcacgaaaaagaaggtgcaggaggagctccgctaaaatccggcttttacgacttgattctgccgtacgtccctccgcccccggcctcaaggacgagctgcccggtgcgcgctttatgaatgacagccgctattttaggctggacgacatgcgccaattcctcttcttgcgcctgatgaagaatcgccatctccgtcccgaaagcccgcttcagtttgtctaacgttttcggcccgacccccggaatgaactgcagcgggatttgatgaatatacggcggccgcggcacgcggctttttttcgggccgctcagttcctccagccgttcactgaccccttttgtcatagttttccccccgcactccggacaggcggaagctcctttttcaaccgggctgccgcagcggtcgcaagccgtccggtaatacttcccgagcttcgggttcagcccgtaattcgccgtgatttttcttccgtccttcccttttaaagccagcgaaaattccgtgaaattcgcttctttaagaagcatttcattatattctctgccgatttttcctaaggaatgcgcatcagaatttgttaaaaatgtatacggatcaagttccgttacccgcgaagccatgtcggtgtcgcagcttaatccgagttccgccgcatcaatgagcgccgggtcgaaaacttctgtcaaagaagatatgaccccttttccgtacaggcttttatgcggggtgaacatatgggcgggaataaacagcccgcccaattcctttgttttcctttgaagattcaaaccggtttcataaatacgctgggaactgagatggatatttttaagcctttttgcgagccactcagaaaacatcttcatttcggcaagagacggcataaagacgagaacgtgaatcggcccgcggcatgtgtgatcatagatttcaagctcactgcccaacagaagcgtcgtattccgataccggatgccgccttctttcagctcacggtatctgccttcatcaattccgcgctcgatttcttctatgacttccggggaatggcagtcgatgatgcccaatagttcaattcccttcccctcactggcctcttctaaaatccgatgcagcgtcaacgttttggccccggtgattttgaccggttttcccgtataggtgcggccgatatgaatatgcagatccgcatagatggttttcatcatttttccttcagtgcttctttcagctgcagatactgaatcgcgtacgccgtttttgcgtcatacaccctgcgggattcaatcagcttcacggcctcttcaagcgtgacctgcatgacttcgacaaattcatcctcatccagttcgcgcttttcttccagcggcgaaagcccttccgcaagaaagagatgcacgatttcatcagcaaacccgggtgatgtataaaaagcggtgattttcgtcaaggtttccgccgtatatcccgtttcttcctcgagctctcttaacgccgtatgttccggctcttcccccttttcaagcttcccggccggaatttcaacgattgtccgttccagcggctttctgaactggtttaccaaaatgatttttccttcttcggtcaccgcaagtacggccaccgctcccggatgtttgacgatttcccgcttgcttgtttttccgttcgggagctctacatcctctaagtaaagatctatgactttcccgtcatacagcttttttttcgcaagtgttttttcttctaaatgtttcatcatgtcatctcccgttctgtctctctattatgcctcatatattttatcatacatgcatgagagggaggtgcttttcgattgaaggtgtaccggaaggataaaagtatcgtattggtcggaaaggcgtgggaagtgcgggctaaactgaaagaatacggacggacattccgctatgtcggagattggatcaccgggccttaacagttgaaaacttcgcgcctttatattacggtcaataaaagactataaaaaggagcgaaacgatgagaaaacgcacactgggacattctgatttagaaataagcgaaatcgggctcggctgtatgtcgctgggcacggataaagctgaagcgctgtctattttggatgaagcgatcgagcttggaatcaattatttagataccgctgatctttatgatttcggcagaaatgaggaaattgtcggggaggccgtcaaaaaccgcaggcacgacatcattttagccacgaaagccggaaaccgctggaatgatgataaagacggctggcattgggacgcctccaaaggatacataaaagaagcggtcaaaaacagtctgcgccggctgaaaacggactatatcgacctttatcagctgcatggcggcacgatggaagatcatattgacgaaacgatcgaagcgtttgaggacttaaaacaggaaggcgtcatccggtattacggcatttcctcgattcgtccgaatgtcattaaagaatatgtgaaaaaatcaaatatctcaagcgttatgatgcaatacagcctgctggaccggcgtcctgaggagtggcttccccttttagaggagaacggaatcagcgtagtcgccagagggcctgtcgctaaagggcttcttacggaaaaaccgcttgatcaagcagccgcaagcgtaaaagagaacgggtatttaacatattcttttgcagaattggaagaaaccaaaaaagcgatcggcgctgccgcacctgacttgagcatgacggagctttcccttcaatacttactgtcacagccggccgtcgcttctgtcatcaccggagccagctcacttgagcagctgagagaaaactgttcggctgcagaggcccggcgtttaagcagccaggaaatcaaagccctgcaataccatacaaaacgggacgtatacgaagcccatcgttcttaaacaataaaaccggcaccttgtcagatgccggtttatttatatttgtgccaatcgagactgctttcattcagcagctcttcaaagcttttatgtttttctttttcttttcgctttctgatttgttccgctttttgctgcgcctgttttttctcgtcttcttccttcagctcacttttcatttgcaaaagcctggccttcagatcttcctccagatcgtcttttaagctgtgtttttctttaggcagctgctttttcatcattacgccccccgtatctgaatatggtgaagcaagtgtaccacggagcgccggaggccggcaacgttcacggtcctgaaaagccggaggaaggatttttcatatgaaaggagggcccctgtgtgaaaaaatggctggcggtgttcggttcggcttgcgcagtctttttggctgccggattcgcttttacgaatctcattatgtttatgaagaaaaagacggatgaagatatcatgaaaaaagaaacggcggacgggcatgatagatttgattcctttcaggccatggaaaaagaagaggccgtcatcctgtcacgccacgggtatgagatcaaaggcttttacgtcgccccgcatcatacggcaaacgccatgattatttgtcacggcgttaccgtaaattcgttcaattcattgaaatacatggatttatttttagattcaggctggaatgtgctcgtatatgaccaccgcgggcacggaaaaagcggcggcagaacgacgagctacggctattttgaaaaagatgatttggaagaagccgtgaattgggtgagacacaaaacgggagacggcggtcaaatcggcatccacggggaatcgatgggagcggtgacggccttattatacgcgggcgggcatcaggatgaaaaaggcgctgatttttatattgcggactgtccgttcgcaagctttcgcgatcagctcgcctacagactgaagcgggagttccggctgcctccgtggccgcttctgcctttggctgatttctttttgcggatgagagaaggataccgtatccgtgatgtatcgcctctatcggttatcagccgaccggcagcccgtgctgtttattcacagtaaggaagatgattatatacctcccgcttcttccgaattgctgcaccgcagaaaacgcggaccgaagatgctctatctggccgaatcgggcgggcatgccatgtcgtacaccaaaaatccggagagctaccgcaaagccgttcaaacctttttagataccatgacgcaaacgtaaaaaagcgaaagaacgtatgctggttctttcgctttcccgtcataaaacgtcggtaatcccgtccatattttctccgatccagtcaatggcgaggtcgattgtcgtaaactcctgcgctttgaaggtcatctcatcctgaagcagccagacatccttctgaacggattcagcgcctccgatggaccagtgcagcagactgtacgggtggttgttgttcagaaaggatacccacgttttatgctgtgccgtctgtttaatggctttcagcttttgattcactttccgtttctccctgctttactaatatgctcattctcgggctcagcatctctgccgggctttttaagacgagcgtttttgccttttcattgtaatcgattgtcatttcctcgtcaaaaaacactttttgtgaggtctggatgtaaagcggaagtccgttggtttcaatggcttcgcattgtcccgttaattcgtccgccagccagatggtcggcacgccgctcaccgcgcacccgcagccttctgcgtcatagcggagctgcgcttttttccccgggttggcgtccatcgcctgctgaagtgtgtgtttcgccgcatccgtcacatgtatttgcatagatgatcctccgtttttcattttcgccattgtagcataccgagccgctgtatgcattgtttctgctttctttacagaagcccgctctcccagtcctttgcctcttgttcagccgccttgatccagtcatttttcccttcactatactttgccgtatcgtacgggtatgccttagcgagccgccgtttcagttccatgtattgagccgctttttcaggcttttcagtgaggtaatcccggaacagcagatggcgcttcacatccggatggcctgtttcgtatatgtggacgtggtgtgtgcgcttgctgccgcctttttgaaagaaacgccggccctctatcccgttttccccttgcgcctcatagccgagtgcttccagctgcgggctgaatcggtcagcatctgaaatatctttgacctccgccagtatatcgataacgggttttgcggccattcccgggatggaggtgctgccgatatggctgacagaatgaagtgcggggccgaagattcggatcaagtccgccttctctctttcaaacatctctttccattccggcttgtacggaacaacttccgctttcctcttcggataaagatgaaaaaacgagagggtcagcccttccggcgtctctgtctgtccggcttctgtgaagccggtttttaaatagagagagactgccggaacgttttgactggcggtagccgcctctattttttgggcgtcccggttttggtcgatcacaaattgaataagcgcccgtccgattcctttccgaaagccggacgggtgcaccgtcagcctgcatatgacaaggtcatatccttttttttcatacgaaatgacgcctgcaagccgatctttttctctgaaaccggcaaacgtctcccgtgaccgctgtatgtcaccgggtgtttcatgcagggctggaatgccgaaaaagccgatcagctcggcttctttttgataagagcagcgttgaaccgccgcaatttcccgcgccgtctgttcttgtgtatgccgtaaaaatgtaatcaatcttccgccccttttgacgcaaacatccgctgtgactccgtcttcgtaatgcggaccgcgtacgcttcataccaggcgctttttcctttttgttttgccgcccggtggtcagtatggtctttccaccttttaatcgcctccaggctgtcccagtaggaaaccgtgatgccgcagccgttttcctcccgaacgctttccgcgcctaaaaagcccggctgtccgcctgccaaattcatcatgcgctctgccgtatgctcatattcctcatcatattttccctttattgatgaaaaaatgaccgcataatagggcggtttgggcgtgtcagctaaaaaacccatattcatccccctctacatatatttcacaaacagaattctgtcttctcccggaccgtcataattcgcaaaaacagggattccgtttacggttttggttcctttttcaacttcaaagcctaattttgtatgataagcgattgatactttattcacgggcgccgtcacgcaattgacttttgtgcagcccctttttttcaccgtctccataaatcgatcgtagagctgttttccaatttgcatttttctgaaatccggatgcacaccggaaaaatgaatgtaggctgtctcagggtctgattgtgactgaaaaccgattaaaaaaccggtcattccctccggcccgtacgtgataaagctcgtgtcctgaaaatgttcaaaaaacaagcgcggcagtttgtctttcatctgcctgccgccccaccattcattcaaaacagacgtaaccatttcatagtcttcagaggtaattgttcgaatatccattatcgattgactctccttttcgtccggcaaaatgaatgtcagctcttctcattggaatataaaaaattatatgtgggttgtttgcaattgtaaatgatttcttttcaagcaaacgaatcagcacgtcttccagccggggaatgatttaccagtataaacgtgatcattgttcgggtacaatgaaaaacagaacaaacgttcccggaggtttttttatggctgatattcttcttgttgatatgcaatcgttttatgcgtctgtggaaaaagcggaagcgcctcatctcaaaagccggcccgtgattgtctcgggagatcccgaaagacgcagcggcgtcgtgcttgcggcttgtccgctcgccaaacgatacggcgtaaaaaatgccgaacggctgtgggaagcgcaggccaaatgtcccgacgccgttattgtccgtccgcggatgcagcagtatattgatgtatccgtcatgattaccgaactgtttgaacggtataccgatcttgtagaaccctactccatcgatgagcagtttctcgacgtgaccggaagcaggcggctgttcggtgatccttttacaattgccgaaagcattcagcaagcgattatgcgtgaattcggaatttatgcccgtgtcggcatcgggccgaataaggcgctcgcgaaaatggcttgcgaccattttgccaaaaaaaacgcatccggcatccacagattggatatgtcaaatatcagggaggatctgtggccgctgccggtcggaaaattattcggcatcggaaaacggatggagcatcatttaagacggatgggcatcagcacaatcggcgggcttgccgggcaccccgccgaactgctgaaaaaacgctggggcattaacggcgaattgcttcagcggacagcccgcggcatcgatccctctccggtcaccgtcaacacgcacagccggcaaaaagcgatcggccataacatgaccctcccgagagactacagccgctttgaggatatcaaagtcgtgctgttggagttaagcgaagaagtggcccgccgcgcccgtttcaaacaatacatcggccatacggtttcggtcagcatcagaggcgctgattttgaattcccttcaggttttcacagacagagaaagctggtctctccgactaatttcggaatggatatttttaaagcggcggtcaagctcttcaaagagcattggaacggtgagcccgtccgcagcgccggcgtctccctttcccagctggagccctgtgattatgttcagctgagcctgtttgatgctcaggaaaaaaagatcagtctcggcaaagtattggatgatattcatgagcggtacggccctgcgtcgctcctccatgccgcttcgctgacagaggccggccaagcctttcaccgggctgaaaaaatcggcgggcattacaaataattgaggtgatatacatgaatccgaacaaattaacacccgggtataatgtcatgtgggaatcaagccggatgatgctgcccgaacatcgggagcagctgcttgcaaaaaaacgaaaagaacgggaattccggcctccggaactgagcgcagagcaactgaacgacatgaaccgcatcattgcggcgtcgattgaagaagacagagccatctcggtcacctatgcttcagcacgcggcccccgccgcttttggggatgggtgaaacaagtgaggcatgacgaaaaacgtttaaaaatcataaacgatgaagatgcgttaacgctgccgtttcatcttattctctcggctgaactggaataaaagcctaaatcgtcctgacagaaaatatgatagaagagtgggaggatcacatgatatttagtagaataaagatgaatgacaagaataggagaatatatgatggatcaatttatagaaaaaatgctgggacaagccctccgccagtatggacggaatgtgtcgacagatccgctgagcccctatgaaaaacagagtttaaaaaaagctttagaagaaagaaggaatgaagaacccgatgaggatctccatgcccatgtagaagatattatctacgattacgtcaccaatcaggggcagttttcctgacacggacgtttatgcaccgggcgaaaagggaaacgtccgagagtaaaccctaaagattgcgtggtgcaggatatgcctgtcgggccttatttcaagatcggctatgccgttcttctgttatttctcatcatttatctcggaacattaatagactttttgttccagcctgttgtgattacggttaaaaccttgtttccgcccattgtattatcgggtgtcctttactatttgtgccgcccgctcgtcagagtgctgcatgcgaaattaaagctgccccaaggaatcgcgattttagcgatttatgcgggaacagccggcctttttgtcctcttcctttatacggcgggccctgccgttcaaaaacagtttacagccttcacagaccatattccggagctttccgcaaaagctgaaaattggatcgggcatcttcaggacagcaaatggttttccaggcttcagcatggggattcctttaaaaaattagcggacaaagccgcaaattattccggttcaatcgctgattctctcagcagtctggccggtacggctgccaatgccgccatcaccgcagccattattccgtttgcgctgtattacatgttaaaagaaggaaataaagccccccggcgactgctgcggcttcttccggaaaaacatcaaaaagaaggaaaacaaatcctgcgggatatggatgaagctctcagttcatacatacaaggacagctgctcgtcagtttctgtgtcggcgttctcgtcacaatcggctattttatcatcgggctcgattatccgctcgttctgggcgcgttcgccatggtgacaaatctgattccgtttatcgggccttggatcggcacatttcccggagtcattgtcggattgttcgattcaccgaccgaggcggtgctggtgattacggtcgtcgtcattgtccagcagcttgaaagccagctgatttccccgcaaattatgggacggaagctggacattcacccgctgaccattatttttcttctgcttgccgccggcaaattctcaggaattgccgggatgctgctggccattccgggatatgcggccgcaaaagtgatcataagccatatgcagaaactattcattctcagaaagaaacaaagctaggagagaaatgattcatcccccatgtcttcacatcggttaaaatgaaaaaacggcgggctgaagaagcccgccgcacacggaggtaaaaaagatgaacatcggtgatgtcatttttcaattgatctcatttattgcagccgcatttttcctgtttgccgtgatatacgtattcagaagcttgaagcagcgccgcatacaattggacagaatcgaaaagaaactcgacgcgctgcgcgaagaaaaaaacgagaagttatagttcattcagaagcaggcgcagccagctccacctttatccgatccgggtcctccgtgtatacggcgtaatgcgtgcttccgcctgcatatggatggcggtccctgtaaagcacggggcatcctctggcaagcagcttttccgtcatcccgtcaacctgctctcttgacgcagcatgaaaagccagatggttcagcccgacccggcatctgtggtactccggtgttaaaaaacgctcctctgtctgtacaagcacaacataaaatccggcgtttttccagctgatgccggagtcccaattttgaaactccctataaccgagctcacctaaaaaccatccccaaaaccgggcggaggctttcaagtcagatacatacaattcaatatgatgcatcataatattcgcttcctcctcacatcacacccgccttaccagcacctcttcaactttatggccgtcacctttcctcaaaatcaaatccgatctgaattttgtcggcaggatattttcatacagattcggacggttgacgctctcccagatggaggcggccatggtatccgcttctgcatcagacaaatccttaaatttatgaaaataagaagccggatcttgaaaagcggtttctcttaagaggcggaaacgctccaaataccacgtgaaaatccggctttcttcggcatccacatagatcgaaaaatcaaagaaatccgatacaaaaatccgcggatcttccctgtcgtcctctaaggtcggcgactgcaggacattgattccttcgataataacgatatccgcaccttcgacaacctcgacggcaccctcttccctgtcataggtaaggtgggagtatacgggcgcctccactctctctttccctgactttatatcgttcagaaactcaagcagcgctttcacgtcgtaactttccggaaatccctttctggacagaaggtttttcttttttaattccgccgtcggatacaagaaaccgtcggttgtcaccaggctcaccttcggcctgtccggcagacgggaaagaagcttttgcaaaattctcgccgtcgtgcttttgccgacggcgacgctgcccgcgattccgatgataaacgggattttcgctgaatgcggatgtttcagaaacacgttgacatgctgattccgtcttgcggcagacgtgacatgaagatggagcagtcgcacaagcggaatataaatcgtttctacttcttccaccgacaggtagtcattcagcccctctacggccttggcttcttcctccgaaacggcaatggaaagatggccgccgaatccggcccacgactcgcggctgtgctgcgtatacaatgtatgtaagttcaattctttacttttcacaattcacaccaatctctctgtatggctttccgattaaaaaacaaacgcttacaaagattgtaacggaaaaccgcctcactgtctgcccatttttttcacaaatgaggaaccgatccggctgtactcttccatttcctccttgggaaccatgcttccgccggtaccccacacaaggtgcacggcattttccatctcaagcccccgctcttttatataacggttaccggcttcggtctgaacgaacttgacggctccggccataccggcgagtgcagagggttcaaggctcttattctcggccgctcttaattgataaagcagtgaaaaaagcgtgccgtcatcagcggtataacagccgctgagtacaggctccatcagagggccggccagtccggacggccttcctaccgcaagtccgtcggcggctgtttgattatcaaggccgatatcctgcacgctgattccgtcatgcaagccggaaaacagtcctaacagcatacagggtgaatgcgtcggctcaccgaaaaaaatatggacatgcccgccatagatcagctttagcgcaagcgcgacgccgcccgggcctcctccgaccccgcacggcaaataaacgaaaagcggttcatctgcacccggctttatgttcatttgatcgagctgctttttcacacggcttcccgcaacggcataccccagaaacagatcccgggaatgctcatcatcaataaaataacaataagggtcctgcttcgcctgcatgcgcccctctttgacagccagactgtagtctgcttcatattcgatgacgcgaacccccttttcccggagcagctcctttttccactgctttgcgtcactggacatatgaacggtcacacaaaagccgagcttcgcgccgattatgccgatactcagacctaaattgcccgtagaaccgacggctatagagtattttgagaaaaaagcggtaaaccgttcctcagtcaatatgctgtaatcatcgtctgttgagagcattcccgcttttaaagcgagatcttcagcatgcttcagcacttcataaatcccgccgcgcgctttaatagaaccggaaatcggaagttcattgtcgcatttcaaaagcagacgcccggggaaagcctgagcggcgctttgttccagacgctttttcatttcattgatgaagacaagcggagactcaatgaggcctcccgccgcttccgtctccggaaaagccgacgcgatataaggcgcaaaccggcgcagcctttcttccgcttcggcaatctcctttctccattcagcgccattctttactggatcatcggttttatgcgggttgatccaaaatacttcacgcgcctctgccatttgcctgactaaaggctctgtcatcaatgccttgtgtatatccaggtcggacattcctttctcccccttgttactttttctttaatgcgcggccggccagtttttctgtaaacgaagggaaaagctgatacagcttcgtcccgaggctcatccatcgcggaagattcatttcccgtttatccgtcagaattacggatgtaatacgctctgccacatggtcggcatcaagcatccatctgccgacgcttttcacataaccgccctctttatctgcaattgtaaagaagtctgttttgatcggaccgggattaaccgttgtcacggctacacccgtaccggccagctcaagccgcagcgcattggaataccctaaaacggcgtgtttcgtagcggaataaaggcttgatttcggcgtcgccaatttgccggcctgtgaggcgatattgataatatggccgcttttcgcatgaagcatcaccggaagacaggccttcgtacaggcgattaatccgaagacgttcacttcaaacattgccttcatatcctccaaagatgaatcagcggctgtttcaaaaataccgaagccggcgttgttgattaatacgtcaacatgaccgatcaaacgccttacgttttcagcctcttctgcatgccggacgtcaaacggaatgacatcacactgtccgccgcgcgcggtaatcgtttttttcacttcctgcaagcggtcctcccgcctggcggataaaaaaacatgagccccttctgccgcgcaggaatatgcaagccgttctccgagtccgccggatgctccggtgatccaaatccgcttatccgttaatctgcccatttccttcaccccttcacagctttaaacatcagagtatttcccgactgaaaggattcagcctccccttttgcagccagtacgtcaagatggccgatcgtttctgacatcattaaaaacaattcattttcatacacagccggaaacagccgccggcatacctggaaagccgtcagcgtttcctctgacaacaggcgcagcacatattccgaccggtttctctgtttttcaagccgcctgtcaaaagcaggctttacgtccgtcagcagatcgccgtgtcccggatataaaagggacgggtttacgtcatacagccgcttcattgagttcaagtagtcgagcatcggggccgcgcgcacgccccccttttccggagcttccagaatcggattggtggagctgttggacaaaagcagatcgccgctgaacatttcaccgcttttttcatggtagagcgcaatgtgagaagcggcatgacccgggatttcgagcaccgtccagccgttaagcccgtcgattttcccgccttcttccactgttttcgttaacagacggtttgcagaaaataagtacgacagcttaactgttttctgtatgtcttcaggcgtcaggggaacgcccatttcagtcataagcgacagaaaaaagtcctcctgccgggcgatatacgactgatcctgagtaatgtacctgtcattcagcggatgcccgatcacttccgtatcctcggaaaaaaggtgcagcagacctgaatgatctgcgtgatgatgagtgagcaccacctgttctatatccgccgcagaaacgccgtgttccttaagctgaaatgagagcgattcagccgcttcctttgtattcgggccgcagtcaataagggttaaggcttcatcttttattaaataaacgataacgtcgccgactgcaaacggagtcggcacacgtatcggaatgatctttctcgctgccatgtttacgctccttcgttcttttcattcctgaataatcatattttagcgttttcttttcactgtgtcattattgcgcatatcggaaaaaaagattgacatcccgctctttcgcatagcataatgaacaacaaactagaaaacacggaacgcgatgacgaggaactagtatataaacaacggcagcagagagcaatgtccccggctgaaagacattgcggccctcttgtttacagaacctgccctcagagcggttaggaaaacctaaacgtatccctcgttacgggatttgagctgagcacggctgattcgtgctaatgtaaggtggtaccgcgaaaccttttcgtcctttttgacgggaaggtttttttgtgttttagaagaaggaggatttatatgaagaaaatcggttttatcggggccggatcaatggcggaagcaatggtgaacggactgctgcaaagcggaatgacagcccccggacatatatatatgacaaaccggtcaaatgacagccggcttgaagagctccaaaaaacgtacggagtgaaaccgtgccgggataaagaagagtttttcagcaataccgacattattgttctcgcctttaaaccgaaagatgcggcagaaagcattgagaacattcgcgaatacgtgaaagatcagcttgtgatttctgtcatcgcggggctgacgattcacacgattcagcaatatttcggcagaaagctcaccatcatccgggcgatgccgaatacatccgcggccattcagcaatcggcgaccggtttttccgcaagctccgaggcgagtgaagctgaaatccggacggcaaaagagcttctggaaacaatcggagaagcgacgctctttgaagaaaaacaccttgatgccgtcacagccattgccggaagcggtcccgcctatgtgtaccggtatgtggaagcgatggaaaaggccgcccttcaagccggcctgccggaagaaacggcaaaagagctgattttacaaaccatggccggggcgacggaaatgctcagaacaagcagcaaacggcctgaacgcctgcgtaaggaaatcacaagcccgggcggcacgactgaagcaggccttcgcgcattagacgagcgccgctttgaagaagccatcatgcactgcatcgcagaaaccgcagcccggagcgccgaaattaaagaacaattcgcaggctccgttctgcaaaagacggaccagtcataaagcatgggggcatcccatgcttttttcattctgtttaactgccgtataagcggctgattctctcttttacttcaggaagatggaatgtggcttcgtgcatgtttacctcttcctcaaccgcttttgtcagctctcttttgatccgtgcggtcacattggttttcagcgcaaccagtgaggctctcggtttatccgccagcagccgggccaattcgcggcctctttgaagggcgtcttttttcggcagcacttcaaacggaacaccccgtttttccagagcggcgccgctgaaattcgcggccgtaaacagcatttcttccccgaggacaattcccagtttttcaggcacaatatacgtcgcgcccattcccggtgtaaatccgtacttcatataattacaagaataaaaactctctctgcttaaaatgacgaaatccgagctcagaccgatcgtaaagccagctccgatggcatgcccctgcatgacggaaatcacagggatcctgcaatccaataaaagactgtgaagctttaaatctgtaaattgaagctttccgctctgaatggtcaaaagcccctcctgcgttcctcccgtgcagaaataatttccgtaacccgtcagaaggacagttttataggacggatgggcattgatgtcttggaatacccggtgcagctctcttacaaactcttctgacagcccgtttttcccggccgtatcctgcattgtgacctgcacaatgcccggttctgtttcctgtacatcaatcattggattcatgtgtattctccgtttctttaaaaatactcaagcctttccggctcttatactaggtcgtccattcatactttctgtgaaactcttttatttcagtcagcactaatcgcgtttttccttgatgcgcattcgggatgtctgctgcgggcgcggcatttcttgtgccgaattttacgatgccgctgtcttggagcagccggtcataatcagtcatcgataaacggacgcgtccatccaaatgccggctgatctgaaattgattctgccgcgcacggctttgcggcataacgacaccgctgtaaaattcagagcagcagcccgaaccgtatgaaaaacagccgacgcgtttcggcgtttcaaaagagccgttatcaatcgtgctggcaagagataaaaatacggtggcccccatgatgttgccgacgcgctgacagtattgaatcccaggcagcacgcgttgctgaaaatccgcttcaatgtcctgcggcttagcctttgccaattttctcatcatcgtccgatgcgctccttttaccattccgccaaacggagtatgaaaagaaaggtattgaaatgtattcttataatccgccccgctcacacgctttcggtattcctgaaatgaattttcacagcaatccaaataagacatgagcgacagatcagcatcccccgcttcactatccggaatcgggcggcaggtatccatgacttcatacccgtaatacccgcttgcaccttgatcaagcaaaaagacatgaggagtgctgctgactaaaagcgcgacagctcccgcccccgcactcggttcggcataggaccattcctccgtcaacgcgtcaccgccttcagccactaaaaagcgggaaatatccgttccgatgatgagcgctttcgctcccggcgatgtttgcgacaagatgaaattcacgcccatttgaaacccggccgttaaagaatagcaagcctgcttcacctcaaataaccggcaattccgcttcagctgcaaataatcatggacatatgtactgatggatttgccaaaatcaatcccggattccgtacaggtaatgaccatttcaatctgattccgttcctcttctgacagagaatcgataatcggttttgcggcatttacggcgaacgtaatcggatcttcaaacggaagcgccaccactttttctttcatcagcaggttctcaaacctttttttatccaggttccgatgttccgcaagctccatgacgtctacatacgcggttccgccaaacacgttcattgcttcgattcctacattcatttctccaagcccccagagtaaagaggcttcccgcgaagcctcttttattttttcgttcaaaactcaacaagcagcctgtcaacgccgtgaaatacagggctcggaaccagattcggctcttgatcctcagtaaaacgccatgcgggcatctgttcaaaaaagtgggaaagcgcgattttcgcttcaagccgggccagcggcgctcctaagcaataatggctgccctgaccgaatgacaggtgctgattcggctttcgtcccaagtcaatctgatcggcattttcaaacttcttttcatctctgttcgccgatccaatccacgcatatactttttctccggccggaatcgtttttccgccaatctcgctctcaaccgcggtgtagcgggttacccgctgaatggaaggtctgaggcggatgacttcctcaataaagtcaggaaggagcgccttattttcaagcagccggggcagaatatgcgggaactccttgagactgagaaatgaatttccgatcacattttccgtcgttacgtgccccgcgacgatcaacaagccgcaaaaaccgattaattgcttgtctgacagcggctctccgtctaaatcagctgaaattaaatggctgattaaatcattttgcggctgttttctccgctgtaaaataaactgcataaagtatccgatcatctgcttttgcacttcattcattttcttttcatcttttacattctggctttggtcgacccagcttttaaagatatccctgtctttcggaggaaatcctaaaagctctgcgatcacgataatcggaagcggaaatgcgtaatcttcaataatgtccatcctgccttttgaacggacggcctgaagcaggtcatcagcgatagcggctatacgcggtgcaagagactcaaccgatttcggcatgaacggctgattgaccaattttctgaagacggtgtgttcaggcgggtccattttcaaaaggctgtctttgttaatatgccggatcattttttcctgcttgtccgcacttaagtatttatgatcggaagaaaaatgactgtagtcagaaatcacccgcttcacttcatcataggtgaagatttcccagcaatcttccttttcattgtaatgaacgggagaggtttctctcatcgtttggtaccacttgtacggctgctgctgtctgatttttgttaaactggtcattttcattcctccaagatgtgtccaagatttgaaatgacccgccaaagcttacgagtaaacccggcgggcggatatgtgaatttacggtcttattttggcgggctgcttcagcatctcaccatgcacgttcagtatcttttcctgcagtttcagaaagctgtgttctgtcattccgtctgccgaatataaaacgccgcaaaattcagaaatcgtttcggctgcgctgtcttcagccaataacgtcatatggttggataccgccacatccatgatggcgatgtttgtcatatgctcttgccactggctccagtagttgacgaaatcagcggataaaatatcggccctgatcgtaaaatacggatcaagctcacccaagaaaataccgtttttatttcggaaataatagcatgtcaccccgttcggatccggaagcggcaggagttcgtaatcagtgatttcgtaagcgtcctgaacgtttatattctgcctgatcagatttttcaccaacgcgtccgtcttcgttaacccccgctgtttggcttttgctattaattgctctaaaaatatgtcttcatgaagatcggcatctagttcatcacggtgaatcaaggtttcagaaatgcgttccggatgttgatagatcggtgcaaataaagccatgttcaccgtctgcagcatcatatttttatcaaataattcatcaggaatgtttatttcccgcgcacccgccgagtcaaaggagtcgagcatgacgattgactcaacggtttctccagccagctgcaattgccgggtgacttcataagcgagcatgccccctaatgaatagccgcctacatcgtaaggaccccggggctgcacggtacgtatgagcttaacgtaatattccgccatgtttttaatgccgcggatcggttcccggtctgtcatccatcctcttgcctgaattccgtaaaaaggacgcccggtccgttcggcaacaggctggtacagctccactgcccccagcgcggaatgaaaccagaaaatcggtcttccctttccccccgggttaagacagatcagttcgggcggttcttgatcatctgtctcttctgatatatcgttttgtttcgtatgttcctcatgtacttcatcagtgtctttttgaacggaaccggtcagatacccggctaattttgcgattgtcggatattcatagaccagatttgccgtaatagacgcttgatacgttttattaatagactgaacccattccacaccgataatagaatccagccccatgtcaatgaatgcctcatgctcatcaatatcttccggcttcagaaacaggatgtccgcaaggctttctttaagctctttgcgcaaagtgccgtcagagatgccggcaaggggagtttctgcttccgggatttgcggacgtaccgctgtttcctccgcttcagcatactcgggtttctttatttgccccgctatatattccgcaagctcctcaagcgtcgggtgttcatacaccttattggcagtaatctcagtgtggtacgttttatttactgtttgtatccattcaaccccgataatggagtcaagccccatgtcgatgaaaggctcatcagcatcaatatcttccggcgacaaaaataaaatatctgccaggcttatcctcaattcttcaagcaatgttctattgtcttcggaaacggcgttttccggctgctggacaggaacagtacaatccaaaggctgtaagacgatcggtttttgcaatgtctccggttcaaacgctgtcatttcgatctcagttaaaggactcagagaaatcagaccttcatgttcaggctgtggcggagacgggggaacggtttgcgtttcagactttttcatggcttggcctggtaaagaactgtttacatcagccgcccaatacctttcttttaaaaacggataggcaggaagcggcgttttataatattgccctccgtcaaaaagccgtgtgaaaggaagatcatatcctctgcaaaaaaggtcagcgatatgtgccaggctttctctgtactgtgcgggtgaagccgccgagcagcactgttcaatgcattccattccgaatgttttcattccggcttcgtctgccggcttctggtccttcaaattggacacaaacacacccggaagctctctttttacaagccactccgataatacccgcttcagttcgtccgcactgcttacgatacaggcaaaccggtgatgcagatgctttctgccgagcaggagcgtataacttatatttcccagatcgctgtctttgttcttgctgagtgaatccagcaggcgttctgcctgaatttccagctgacgctccgtccgcgcagataaaggaatgaggcaggccggttttgccggtgaccggcgcacggtttgcggcgcctcttcaataacaagatgggcatttgttccgctgaatccgaatgaactgatcgcggctctgcgcggtgcatccggattccgttcccacggtatcagcttttcattcacaaaaaacgggctgtccgcaaattgaatatgctgattggcttgatgaaaatgcagggaagccggaatctgccgatgcttcagcgacagcaggattttaaacaatccggccatccccgcggccgcagcggcatgtccgagattggttttcacagagccgatggcgcaatatccttttttatccgtatagcggcggaaagcgcgcgttaaggcgctgaattcgatcgggtcgcccagtgcagtgcccgttccgtgagcttccaccatttgaatggtttccggattaatgtgaaaagtatcatagacatgccgttccaatcgttcttgagaaagcgcgcttggagcggttattccgtttgtagcgccgtcctgattcattgcagagccttttatgacgccgtacacatgatctccgtcactgacggcgtcgctaagacgtttcagcaccaccgctcccacgccttcacccggcacgaagccgtccgcgctttgatcaaacgtatggcagcgcccggtcggtgacagcatattcgccttatttgacgactgataaaaagcgggagtggattgaatgaaaaccccgcccgccaccgccatttcggtttctttcgtccagagcccctgacatgccaaatgaatggctgtcagcgaactggaacatgctgtatcaacagtgatcgccggcccttgtaaattaaggtgataggcgatccttgccggagtgacggaattgtgattgccccaaaaagcctgcgcgggcccctgctgtttaaaaatggcctggtaatctccgccgcaggagccggcatacacgccgcattcccggcctcttaccgagtctcccgcatatcccgcatcttcaagcgctttccatgattcttccagaaacagcctctgctgcgggtccatataggttgcttcacgtcccgatatatgaaagaaaacgggatcaaaacattcaatgccctctataaaactgccatactggcattgactgtcagagacagcccatctgtctgcttttttaatcagatcccgtccggcggctaagttttcccaaaactcatggacattctccgattcagcaaaccgcccgctcatcccgataatcgcgatcggttctttttcaggtaacacagctgctgattttaccgtttcggccggatccttttgttcggggcggtacgtcatttgatacggctcagaaacgctgatgacgattttcccgatatttccgcggtcatccagacagtgatacgcttcttttatgtcttcaaaggaaaagatttttgagatgacaggctgaatgactccctcttccgccagccgctgcagttccaattgatagtccttgacctgatccggattttgaagagacagcttccgcaaatccacgctgtgaaacgattgattgttatgaaggacggacaagtcgactgatttagcggatttcagcgcagtcatggcaatttcgatatatcttccgcccggcgccaggcaattcattcctttttgcatggcatcaccggccagggtattaatgacaacatccaccccacggccgccggtcattcgcatgatttccgtttcaaaatcttcttccaaatagcaaatggtattgttgatcccgagcgaatgcagatactcaatttttttctgtgatccggccgttgcatatatttccgcgccgatatgccgggccatttgcaccgcgatcagccccgttcctcccgtcgcggtctgaattaatattttttcgccttttttaagtccggctttccggaaggcgtctatcattgtcactgccacggtaggaagagcgcatgcttcttcaaaggtcagccgggccggtttatgatagacttgatgttctttacatgtgatgagattcgcctgagagccaaattcctctcccataccgacaatcacttcatcacccggaatgacggatgttacatgcctccctgtcttgatcacgacgccgcttgcttcgaatcccggagtgaacggataaggcggcatcgtcggatacagccctctgacacaaagcaagtctccgaagttcaaagaaaaggcgcggacggctatttgaacttcgtcatcttttgtctcgggcacttcactgcgggcaatcgtcagatcttcaatgccgcccggacggtcaatcacaacccggaacattcccgagtcatcggactttgcgaaagaaagcggcatccgttcttgtttcggtttctgataaccgttttcctttctatccgtcttcaaaggtttttcagcaggccgttcttcctgaagcaccgggcggattttcgctctttcggtctccagagatgaggctatgatggtttcatattctgccgagatataaccggtcagcagtttcacatgatagtaatcaaataaaatcgttgtctgcagtgtaagattcaatcgcttattaatctcgttaatcacattgacggccaaaatggaatcaataccgtattcagagaaattcagttcttcctgaatatcctcttctttcatttttaatacatcggcaatacttgttttgatgacagagcggacatgggaagcgaccgattccccatcagccttaacagcttgatgctcctctggcgcgcggctgcgggaaacaggctgtgcgggctttcggaaaacttcggccggggcggcgtatggctttctgccgtctctgatcccttgcatccggacgagtccgtcactctcagctgcgataatctgctgacctaaatcatgagccgtttcagcagggaaacaaaccgctctgtatccttccgaatgcagcacacgctcccacgattttggatataggccgggacttcccggaatccgaagctcagcatcctcataggaccaccagccgtcaagcagcccgaaggttaaatgggtaaaaacagaacgatcgctgatttcgtttatcaaaatcatcccgttgtatttcaggagcgctttcagacggcgcagtgtcaaaccgatattttttgtggcgtgaagcacattggcggcgatgacaatatcgtaaacacccgttttgatattttgtgattcgcaaggctcctccgcattaaacaaggctgttgtcaaatacggcacatcaggtccgtattcctgttcggcatgcattaaaaaagctttagaaacatccgtataacaatattccgcaatctgttttgcaaatggtttcagttttgtaaacagcatggcgctcgttccgcccgtcccggcccctacttctatcagcctgatacgggcatcgggatgttctgtaaggtaggctttcaggtaagcggccgcggaatctgctaacacttcattaaaataatccgcaacgggattatgcttataaacaccttcaacgagccgcattgatgaatcgggaaatacgatatccgtagccggacgttctccttttaaaattgaaggcatcgcttttatcgtcgcctcggccaattcagcttgcgcaagctcccccttgggaagcaggcgtttatgggcattccactcattccagactgtgcggccgtccgggcgctgatccgcgagaagagtgatcgtgtatccgtcatacgcgatatatccgttttcttttaatagattcaggctttcttccagccatctgccgtatgtgccgatcacgccggcgctccgcatggatgctgcaggtgtggtgacaggctcgctgaaaaacccgattgactgtaattgataaaagagcagtttgcaaagaaggctgttcatatgcgcaactccatttctcgttttaaagtctcaagccgttcattccgatccggattttgccgcttgacgctttccataaatgaaggctccgggccggatacaaccgatattgcatcttgatccgtcagtgcggctaagccgtgcggagcagctttgatgaatgccgcttggctgaacggttctgatagtaagacttccagcgcctccattgcttcatcgggttcaatagaaccgatccctgacgcctccatccgttttctgtaagacgggtctgatacaacgcccagactgccccaatatccccaattcatgactttcacttcacaatcaagcaaggaagcgatatggcgggcaaaggcgtcttgaaatgtacaccctgccgcatagttgctttgcccggcattttttgtgaaagaattaacggatgagaaaaacagcacaaaatcaagcggttctcccttaaaagcttcgatcattcggacgctcgtattcaccttagctgaaaaagcgtttctgaaagaagcttcatccatattcgccatacttttgtcggcaagcgttatcgcggaatggatgactcccgttatattgccgtatcgctctcttatggaacggacggccgctttaagcgctgcggcatcttgagcatcagcctgtatataatgcggcgcggggcctgatagggccagcctgtctattttgctctgaatctcctgatccttcggccgcctgccgatccatatcatccgtgctttgtaacgggtgatcatgtatttgctccatgcttctccgatgccgcccgctccgccgatgacagcataaacgccgccttctctgtacgacatacgcggagcggaacttgtcagcacccggactgttttttgcttgtgccaagctccgttacggtacgcggcagcatttccgtccggatctggaggaaggcgccagatgtttttcatctcagacgaatcactgccttcttctgcatcaatcagcctgatgtcccagttcggatattcttttgccaatgaaccgatcaaaccgtgtacgcctgcatgctcaggctgcgggagatcacccggatacacggactgtgtctgccgggtgaccgccgtaaagctgatgtttcggtttccatacccgagtgacagcagcgctttgatgaaacggaaacattgaatcaccccattctcctgctcatcaagcatttcctgactggcggatgcgggtgcgaaacgatccggcgcaatccataagaaatggcggatatcttgataaccggctgtcaattcacgtaatgtttgctcgcttgaatgatccggcgtctccgccagatgggcgcggggccacatttttgccgcggcctttatggtatttcccggctttccgatgatcagcaattgttcctgatcaaccgctcgattttcttccagggaaaagaaagttttgtcccaaacaggggcaagcatcgccgtctgaacttcctgccgtttgctttcggtttggtttgtctgccggacagcccggcaggagaagcccgtcaatctcatacaaacagcgccgttttcatcacataaatcaatatccagcgtcagcgctccgttatctgaccgatcgctctgtttgcggacaagcgcccacatcgttttctgagtcggctgaaatatttctgcctgccgcagggaaaacggcagcatcggagtgtctccggcagtatctgaaccggcccccagtgacgcctgaaacgcggcatccagaagactcggatggatgacaaactgatcggcggtactgtctgccgtttccggcagcgacagccgggctgcagcccccctctctccgatcatcagctgatcaatgccttgatggctcggcccgtagatcatacccgcatgccggaaagcctgataaacctcatcagacgtcataaccgattgactgcagccggacagccagccctctaaatgaacagacggaaccgctgctatctctcccgataccgcagtgcctttactgtataaaatccgttctcccccaggttcttccgataggctgtaaatcgtaaattcaatgtcttcattttccttaagaataaggctgatatggacttctacatccgtccctttatgaatgacaggcctcatccatatgagatctttcaaatacattcctttacgtccgtccggcacagcgtatgcggcacgctcaacggccgctctggccatttcgatcacggcggctcccgggagcaccttctgtccattaactgtgtgatcagtgaaaaagaattcccgtccggtaaaaacagaggtgaatttcagctcccaaagatcggatgtgttttcatggagcagcggatggatcaccgttttgccgtcatccctttttgaaaccgcctcggcttcatcttgaatccagcatctgacttttgcaaacggatagacgggaagactgattctccggggtttttgttccgaatataacaagttccagtccacatcgactccctgcacccacattttcagcaaatgaccgtactttctctttttcagccatttaaccatcgcttcctgcaaatcttcatcagattcaaacacagccactgtctcatgatttcgcttcgcccgtcccctgtaaagatgcggtgcgttttcattttccaagtacgatctgagcttgtcctccagctccttaagggagtccgcaatgagagccagccgctcatccatcgcttcgcgccccgcttgtaaagtgtacgcgacatcaaataagtccggcttatcaatatgcttcttttgaagaaaagcaagaaggcgctccgcatattctgtcagacgctcgccatttttcgcagacagcagaatgaccgccggctcttggctgctgattgcttgtttgacaggagcctcatattcttcaataatgatatgcgcgttagaaccgcccgcaccaaagctgctgattcccgccctgagcggctgttcttctccgtctgctgaaatccgtttccaatctgttaattcacggcagacggaaaacggcccttcatcaaattgaatattcggatttaaaacatcagcatgcaaggatggggcgatttgtttgtgcttcatctgcagcagcacttttgtaactgcggcgatgcctgctgccgattccccatgtccgatatttgatttgacagacccgacaagacatgtttcaggaacatcaccgaatgcatcggttaaagcccggatttcaatcggatcgcctaatttcgtccctgtcccgtgcgcttccacatagctgatccggcccggagatacccccgcttcctgtaaagcttgagaaatgacttcgctttgcgccttggggttcgggacggtgtaaccgctcgctctcccgccgtgattaatggcagctcctttaatgacgccgtaaatccgatctccgtcttgtacggcgtcttctaaacgtttaagaagcagcaccccgaccccttctgccggaatatagccgtcacctccggcgccgaaactcccgcagtgtcctttagatgagatgaactgcccctggctcagcatgaagtacttgttaggatgaacggtgagattcactccgccggcaagcgccgcgcgaatccgatgatcccgcagatcccggcacgccatgtacaatgaagtcagcgaacccgaacacatcgtatcgaccgaaatgctcggcccttgaaagtcacaaaaataggagacacggttagcaatggatgaaatcccgccggggagcccgatatgccgtcctttcactcccgcttcagccgcgaatagcgggtattcctgatacatgacaccggcatacacgcctacctgacgccccagttcaggtgatgtcctcgtatatcccgcatcctccatggccatccaagcatgcattaaaaacagccgctcctggggatcaaggtgttccgcttcccggggggaaatcttaaaaaactcaggatcaaaatcggcgatcccgtcaatgaacccgccccatttgctgtagatcgctcccggcgccgtacggtcctcggaaaagtaatgttcccatttccagcgatctttcggaatttcggtaatacaatccttgccttgtttgagattatcccaaaacgcatcgatatcatcggcctgcggatacttgccggaaatcccgacaatggcaatatccagcggttttcctttcgtttcctgacggctttgattcccggacggggcaaaagacgcattttcaagccgatttggctgaagcacttctttcacagacgcatttttcaattccgccagctgttccccggtatgactgaggattgcggcatcaaatgagagaaacccgtcttttttatgtttgattgtattcaccacatagacggtatcagacatgacaggtccgtaaagcgtcagcctctcaatcatgagcgggacgtgaatccgctttttcagctgcaattcttcttcaccgagcgacatataacatgaattcaatataagcgggtcaaatgcaaagtgatgcagatcgcctttttctttttttcctgataagtccagctgcaataaaaaggagctctcactcattttgtatcccgctgttaccgttttcagcatcgggcctatcgtgaagtcggcaaccgaatcgtacagacgggaaatgacatccggcgccaccttttgtgcatgcgacttcatttgctcaacgtcatatgatttttttatgggtgcctctgtatatctgcttatttctccttccgcacatgtcttccggctttctttaccggagacagtgcagcttgctgtaaagcgttcggcactcttttctgccgcaaatgaaatgtcaatctgcgcggcctctccaggctccagcgtgacgggcccgcccgtaaagcggatatctttcagctcggcgggacacgtgccggaatgagacgctccggatgcttcaagcaccagacacggatacactacacccatcagtgccggtttgccgaaaaccagatgatcctgaaggaatgcttcatgttcatagaaagtaaatgtctgactgcctgattgtgtttcagagaccggtgctgcatctgcgacaaggctggaagattcatctgttccttttgtttttatgtcttcgagcagttcggatatgctgctgcactcaaataaaagagtcggattcagacgcagatcaaacgccccttcgatgtctttaataatagccagaagctgtgacgattcaagacctaattcaaaaaacacggtgtgcgcatcatttcttgtgactgaacggcctacgtatgtcgagaaaatgcggtataaggtttcctccatctgctgaacgcctggtatcagctgccggtcaaaccgcacctttttggctgtcaggccgagcagtgaagcaatatgcgcaccgctgaggttgtaaaagtcaatatccattttcaccatttcagaaggcgtgccggactttttcgaaatcaccgcgtaacagcgctccgtaacagtctcagcggcaataaacgactcataataaatcggtaaaaataactcggcgcctgcagctgtctgcaatacgccggaggccatggcggcaccgtccatcagcgcgggatgaaagagagcgccggggagattttcccggcatgaatcagactgccgaatatcaaggaaacatgcctcttcataagcatagatctctccctccggcttcatcagcccgtcatgcgacagtccgcggcttctcgcggcttcgtaaaccgcatgcaaggagactgatggaagtgcggcttgttgttttttctcccctgcgtcaagacgcctgtctgatgagaagacttcttcatgcatctccgctgataagaaaaccgtcccggaatccgcctcgcaaatcgaggcagtccagaactccttttctttactgaatatgacactcacatcaagccgctctgaccgcttcactgataaaggatgataaatggtcacccgtttcagacagatggaacggaatgaaagatcaaggctttgctttgccagctgatacagcatatcaatataggccagaccgggcatgacagattctccgtgaacaagatggtttttcataatgggatgctctgccgtcaggcgcagattcactgtttttttcatggttagtccccttttaaaaacgtcacgttgtcacctgccaaaacgagtctgcaggtgcagtgcttgtctctgcttttttctcatatttctttaaaagatccgcaatgtccgttttttcattacttgttttttccggttcactttccgtgctgttccagccgcccaagagcgggtagtgtttttttctgaattccggcggctgaggcgaccggtgatgttcccgctgtctttcacctctgtattcttcaacgaggatatgagcatttgtcccgccgtcaggaaatgaactctgagctgcgacgcggggtttcttctctgaatgccaatcaacgggttcacgattaaaatgaatacgcgacgcttcaaagtcataatgttcaaatgggtcacgcgctgataagaaaggcggaatccgcttatgatagacgctcagcacacatcggatgaagcccgcaagacctgaagacagaagcaaatgccctacattcggtttcaccgatccgatccggcagggcagaagcgttttccggttcagctgatagacatctgagagcgccttgatttccaccgaatcaacgattggggaaccgcctccgttcacttctatatatccgatgtcttcaggcgacttttccgccatattaagcgcagtttgaatgacatctctctgcgctcttatattcggtgaaccgggaccgagcgtccggccgtcattgtttaccgagacggcttttatgacgccgtaaatgcggtctccgtcccgcaccgcatcgctcaatcgcttgataaaaaccgcccccgctccttctccgagcacttctcccgctgattcacggtcgaatatatgaaacacgccgttctcatttaaaatatggcgcgctccgaataaccggtgcgcggacggagataagagcagactcaccgaaccgactaaggccgcgtcaatccttccggccaaaagggcgtcttttgcaaaggacagcccgatcagccctgaggaacatgctgtatccacgacaaggctcggccctgtgacattcaaaaatcgtgaaatgttggccgccaaatagttttgccccgcccccaaaatcgggttaggcgcctgcaggatatgttccataccggctgaaggctgcgccctgccgccgatgtacacgccgactttccggcccgacaaatccttttggccgtacccggcatcataaacggaatgaaccgcttcttctaatatgatccgcgcctgcgggtccataattgccgcgtctttttcagagatgccgaaaaagcccgcatcaaacatgtcgatatcatcaatccaccccgcataatcctttgcatttgctgttgcatgccagcgcgatgcggggacaggccggatggcagtattccctttcatcagcagctcccaaaaagcatccgttccgcccgcccccggaaaacggcaggagatgccgacgacggcaatatcgtcttcggtatccgctttcggcttcatggatgttctctcttcagcggcggcggttacatcaggctgaacgtccccgtcttgaacgaaaccattttcttttgtcacaaaatcggcttcatgatgcgctgcgaaatagtcaaccatttctgtaatcgtttgatattgaagcattaaggacggtgttaacttgatgctgatccgtttttgcaatgattgaaccaattccgcaaagagtattgagtcaatcccgtattcatcaaacggcatatcatcttttatctgctcatccgtcattttcagttcttcgctgaaaacggtgcgcacccattgacgaatcatatccttcaccttttggtcaccggcactgctttttttcatgggagcttcagttttcttcaccttcagaagatcaccaaaatcagccttactgtcttcgggaacacaaggaattccgcagctttgtccgtttaatatgatgtaatctaaaaacttcagtccgtcttcggcagacagcctggaaagtcctgatttttgataagcaggtgtttccggcaggccttcagccatgccggtttctttccagacgggccattgaacggctttaacaaacacgtttcctttgcctgcctgatgatttgcaaaagagtccataaatgaattagccatcgcgtagtcactttgccccgcagcaagcgaagggatcagacccgaaacggatgagaacaaaataaaaaacgacagcggctcattccgaacggcttcatagagaccgccaagccctgttactttcggcgtgcaaacgctttcgatctcagtttcggttttgttataaaaagcggggtgttctcccattgcacccgcgcaatgaaaaacaccggtaatcggtcccattgtgccgcggatgctgtccgtcatgttccggagccccttttgatccgtaagagaaacgctgtaataacggatctccgcgccccgctcggctaacctctgcatccgctcggctttttccgggagaatgccgtcctttttcatgtcttcccactccgaggaatcgggaagcggctcccgccccatgatgaccagttttctgcacccgcgtgaaacggcatgctccgccgcaattgcgccgatcccgcgcgatccgcccgttattaacagcacatcatcagacgaataggaaagctcaggcaccgcagacacattcgtacccggcttcagaaacggcacataacggcgattcagcctgtagcagcattcactgccgcttttggcccgcggctgtaaaaattcagtttcaatctgtctgcttaattcttctgtatgctcaatcgcacaatcgctatctatcgtaaaagaatgaatgttggcatactcagcgcccagcatccggtacagccccgccgttttcgccccctgcatcagaggtttactttccttgaaaggctggaggcggtgtgtcacttggctgagcacagcgccgctatgacggaatgattccagaacctgctgtaaaaaggcaagctttccgtattctatctcttcccgccgttcatattccgcatcatatgcggttatgtcgacgaccccgagtatctgtttgttttgaagagactcccgcactctgccgtaaaggtttcgccccgatgcggcagcgtaataatcggcgccgtcttttgcctgatggatgaaacagatcgtttcaatatggccgtttcctttaaatagagcatcggccaatcggctcgtcttatcagttgcaagtatcattactgttcctgataatgcttcagactccgccggatcttgctgcttccagtctttttgaagaatgatcttttggttttccgccggttcgtctgtctgtttccggatatccgcaggcacaggcacccaataccgctccttcgcgaacggatatacaggaaggctgacccgtttcggcttctctccttcgtataactggctccagtcaacggcggctccttttgcccactccgtgagcaatctggaatattgcttgtttttcaaaagctcggccattccacttgttgaaataacatcttgagcacgtccgcggaaacacccttcaatttccgttttccgttcaagcacatccttcagtttcgcttgcaggccgcaaacggatgtaacgatcaatgccagccgttcaggcatcgcttctctgcccgcttgaagcgtgtaggccaggtctttaagattgacttctttttcccgtaaaaagcggtcataccgtttgacatattccaatagccgttcttcattttttgccgaaagcagaaacagaaccggctcgtcttcccgtatactcagcgatttcttttcagcctgcggcggcagatattcttctatgacaaaatgggcattgctcccgctggcgccaaaagaacttaaacccgctcttctcggctggtcaggatgtgacggccgttcccattcttccagccggtccgccacataaaacggcgtatccggaaatggaatatggggattcagcgtgtccgcgtgcaatgacggaaagatttctccatgcttcagctgcaaaagcacctttgttaatccggcgattccggcggctccttctaaatggccgatatttgatttggcagagccgatggcgcaaaaccgctttttgtttgtccatttgcggaaagcgcggctcagcccttcaatttcaatcggatcacccagagacgtacccgttccgtgagcttcaatatagctcaatgtctccggatcaatgccggcactctgaaaggaatctgtaatgacttccgcctgtgatgccggatcaggcacggtcaaaccggatgtttttccgacatggtttaaagcggagccttttatgacgccatatatcggacagcccatcttttccgcttcttgaacggttgtcagcaacaccgcgccgacgccttctcccggcacatagccgtcaccgccgtcggcgaagcttttgcagacgccttctgaagacagaaatccggcattcgccaaaaacgcatatttatgcggatgtgtgaccgcattaacaccgccggcaatggcgaattcgcactccccccttttaatgctttcacatgccaaatgtatggatgtgagcgaagaagagcacatcgtatcaacagccattgacggccctgtaaagttcaggcagtgagacacgatattcggaacggaggcaggcgtcacgcccatagacagcggtgtgccccgctgtgtgatttcagcgccgaacagctcataatggctccaaaacacacctgcgaataccccgacgcgttttcttttttgtgaagatggcccgcgcgccgttctgtcctgataaaaaccggcatcttcacaagcttcccaagccgtctctaaaaacagccgcgcctgcgggtccatcatttcagcctggcgcggagtcagattgaaaaacagcggatcaaagctgtctatgcgatctaaaaatcctccgtaacagtagaactgatctgcttcatatgagaaaggataacctttccatctgtctttcggcattgttgtgatacagtctttacctgagcgcagattttggtaaaattcatcgatgcttcccgcctgcggatatcttcccgccaatccgattacggcaatatcgtgctcttctgtatgtctctcttgttttcggctccttctcttgacagctgcatgggataatgaagagcggttcttgtctgccatcggaaccaatcgggccatgctttcagttacagcaggctccttcccgtataaaataacggattgcagcttgccgagacgcagcatatattctagtgaagccatcccttccccggccggaagcgggctggtgccggttgcatcattcatgatctctttcatcaaactgtcaacctgcatgccgccatcttcccaaagcggccagttgatcgtcatagaagccccggtccgttcgcctttttccgctttgcaatcgcgatatttcatatattcatccataaaagcgttcgctgcggcataatctgtctggcccgcatttccggtcaacgccgagaatgaggaaaatgcggcgaaaaattcaagcggttcatgccgtgaagcttcgtccgcatgaatcaggccgctgattttcggcaggaacaccctcttcaagtcagtactgtctttttggatgataaattgatcttttaaaacaccggcgcaatgaaaaatgcccgtcagacggccgaaagtttctgtaatctgagcaaatgcccgctctgtttcggctttgctgccgatgtccgcttgaacgtaaagaacttccgctcccaatgctttcagtctgctgatcttctcagactgttccggcgaacgcccgatgagtgcgagcttcaccttttctttttctgcaaggtgacgggcaagcagaaatccaagaccgccgagacctcctgtaatgacatatacgccgttttgtttccaaggagactgtgtctgtccgcccggtttctcaatacgttcgaacaatctgatctgccgcatatcgtctttataccgaatgtctgtgcagcctgcatgagagcagtctgcttctgttctaatgattgcggccgtctcacttggcaatctctcattcttgtcacagaaggtgatcacctgagtgcgaagagccggattttccagatgtgccgttttcagcatagccccgagagcggaagacaatgccgctccattctcaacggcgcatacaagctgaatcaatgtatgttctttcggatggtctgtcagttcccgtttaagcatacgaaatataagctcggcatctgctccaaactgctcatctgcaacctcatgctcccttttcagttctatcacttccgcttccgggcaatgtgtgccgagttcaccggtgagacggggtcctgcatcggcagcaataataagatgacgggtgtgtttttgcccgttctgcaccgccgtttccagcggatgatctttccaggcgggttcaaaaaacagaacctcatcagcgatgtcagcgtctgatgtatgccgttcttcggccgaatctttcagcacacagcccgcttcattgataaggtaatccgcaaggcggcggacagatgaatattcaaaaagcagtgtcggataaaactgctgctgaaaagtctgctctaatatctttacaagcttcagcaaatgcgccgagtcaagccccatatcataaaagcctttccgcacatcaatatcctgtgccggacgattgatcagcctggcgatttccgactttatgtaagtcaccatgttttgttccggcgtttgctgttcagacacgtcttctgcggccacaggactttcgggctctccacggccgtttttgttctgctgaggcggcttctctttgtctatcagatgggtaatcatattcgcttgtctgaccctttttactgtcagtttctcacattcggccaatacgttcccttccctgtcgtaaatcgtgaagtcggccgaataaaaatcaggttcgctatctgatgcgccgctttcagtgcggctgttttccgcagaataagtgtaaatcgttttcggaaacggctgatatatgcaaaaacgattaatcataaaaggaatatacggtgtgtcattctgcttttgggccgacaatgcaaaggaagagccggcaagggtggacgcatctaaaaaagccggatgcgccttgaatttctcccggaatccttcagccaaatcactcagagtgagctccattaattcttctttatcctgaagctgataaacggccccttcatttttcataaactcgccatgctcaatatggcttcttcttgcaattccgtaaatgtcatgcatgtcccattttcggcttgcgtttttcatgaatgcttcaatattcagctcttttgcccggggcgtgtctttttgcaaataaagctgacattccatattctcatcccgttttccgccaagcggtgtgccgttttttgctttttcgcttgtaatctcaactttccagctgtcacgcgccggcgtaaaggtgacatacaggtgtttatcaaactcttcagatgttacaacaggctgcttaaaaataatctgtcttaattctataggcctttcaccgagatacccggcggcgagccgatacagcatatctattaaagtcacgcccgggaggacgcggatttggtgaacgcgatgatcccggacgatataattcgtatggctgattttctgcaggaacgttttgacttgatcggtggcaactgccaatctatcacacctcgcttatttcaaacattgcttctgtgcccgcctcattttcttccgcttcggacaactgtgctttttcaggccaataccgctgttttcggtatactgtctggccgcctttcggttccatggtcgcttttcgttctttcggaattccttcgttgctgacaatgatatgggcgttattcccgcccaaaccgaacgcgctgaccccggccctgagtatctctttttttccgtcccaccgcttcagctcaagcacaggataaagcggcgaatcatgaaattgaaagcgggggttcggtttatggcaatgcaaagtcggcggcagttcttcattggcaatcgccagcaaaactttgatgattcccgccgcgcccgccgcactcagcaagtggccgatattgcttttgacgctccctacaccgcaaaattgtttttcatcggaataagcagacaagacattggttaatccttttaattcaatcgggtcgccgatcaaagtaccggttccgtgcgtctctacgtatgtcatggtgtccggctcgatttccgctgattgaaccgcctgctcaatcaagtcctgctgcgcccggggattcggcgtagtcacccccattgtgctgccgtcattatttatcgcagagccgtcaataacgccgtatattttatcttcgtcttctatcgctttttcgagcggcttcagcatcagcacaccgcagccctctccgattcctgttccgtccgcatcggcatcgaaagattttgaacggccatttggcgataagattctcgccgcgctcattgtgagaaaaggtttttcatcaagcaaaatgtcaaccccgcccgcaaaggccgcctccgcttctccattttgaatagcctgcacggccaaatgaattgccgtaagcgaactggagcaggccgtatctacgaccaggttgggccctgtaaagttataaatgtgcgccatatgtgcggtaataaaattttgccccgcgccaataatcgcgtctttttgcaaatattgaaatttctgatgaaacgcacctgcccttgcaccggcaaaaacgccgatacggcggccccagagatcctctttttgataaccggcatcggccaaagcttccgcgctcacttcgagccactgcctttgcagcgggtctatcatcggtgccagcgtttctgaaatattaaaatactccgggtcaaattgatcaatatcatgaataaaaccgccccatttactgatgctttttccttcttgatattcacccggctgatagtgttccccggcgttccatctgtccggcggaacttcagtgacggcatccgttccgctgcggagattcttccaaaattcttttatatcccccgcttccggaaaatgacaggccatgccgatgatcgcaacctttccccgtttcccgggcttatctgccgtttttttgctctgtttcggcgttttctgcaaagggaccttctccgcgggaaccgctgcatctgccgaaaaagcttccggacaatgtgcggctaaataatccgcgagctgttctatggtagggtgttccagaaggacagtcggatcaattgaaacggacggcagtttttgatcgatctttgtcagcacttgcgccagaaagatagaatccattccgtattcctgaaaaggcacatcgatatccatatgcgtttcatcgatactcagctcttttgccaaaagcgacttcagccaagattgaatatcagtccggttatggacccgtttttttgtttcaggaggtttggaagctgttctcattcctttatgggcggctggcttggcgttttcaagcgctttgatgtcccaatcatttttcacttgtgccggcagcacgacagttccgggtctttctcttaaaatgtaatcaagcatcttgagaccttccgcgtcagagtgacgcagcaatcccgtttgctgatacatcccgctttttgtatccctgctcatgcccgtctcatcccatgccggccattgtatgctcatgatgccgccctcattgttttctgcaaaatagtccatataagaattagccatcgcataatcgctctgtcccgccgcaagaatcgggacggctgccgagacagatgaaaacaggacgaaaaatgccggcgcatcatcctttacactctcatacagaccgcggaggccgtctgctttcggtgcgagcacccgcgcgatactgtctttggatttgcggagaaaagcagggttttcacggtccgcaattcctgcgcaatgcagaatgcctccgacaggtccgagcgttgtggttacctcttttataagccgtccgacggcctgcttatccgtcagatcaactgctgagacgcacacttttacgccctgtgattccagctttcggataagctgtattttttccgaaacgacagggtctgtttgctcaagatcccactctgttttcggcggcagctcctttctgcctgtcagaagcagtttcttcacaccgtatgcggaaacgaaatgcttggcgcataaagcgccgagtccgcgcgttcctccggttatcatgaggacggcgtcttttggaaacacagtccggtctgtttgcacggcttctggttcaatctgatcagtctgccgaagaacatagctgaagcgcatgccgtccctgtagcaaacagcagattccgttaagtctgattcaatttcttgtttaataaaagcggctgtctgctccagcggctcttcaggatcaatatcggcgtgacaggtgagaatatggctgtattcatgccgcagcatgcgataaagccccgctttttcaataccatgcatagcggccgcattatttttgaaggattcaaggccttttgtaagataaagcattttcatgttttcttttccgcggccgtattcaatcagctgctgcagcgatgccacccagctgatgtcctgccgcttttgtcgggagccgcagccggtgaagtcaataaacccggaatagatggccgcattcgcatcctgtaagaaagagatgagctgattttcctgcacaatgtcagcatcattcagctgttttttcacctcggcggcaaggtcttttgtatcctcggagacgatgagcgctattttgctgaatggctcggatgaagacactgcctcgcaaggctcccatgttttctgcaatactactgttttttgattcgaaagcggcagctgctcccgtttcggcacccaatagcggtctgctctgaacggataggagggcaggctgatgcggcgaggcttactgtccgtatacagctgctcccaatctgtgtcaaatccgtttacccagagccgcagcactttcttgtatttctttttctcaatccaggcgctgacgaggtcagctgcgtcttcatcgtctgagaacatggagatcgtgttattctcgcgttttttacggccgctgatgatatcttcgctgttttttcccgtcagaaacgcgttcagtttttcagtcagttcctctgcggagcctgcaatgattcccagcctcgcttccattgcgtcccgtccggtctgcagtgtgtatgcaacatctgcaagatcgatatggcgggatgatccgttttggataaaatcgcgaaggagacgcgctctttctttcagccgctcttcatttttagccgacaaaacaaaaagagatgacgctttctcacgggtttccggctgttccgtctcacttttgcccatgtattcttcaataacgatatgcgcattgacgcctccgaaaccgaatgagcttacacccgcccggcggggcaggacccggccgttttcatcacgcagcgcttcccactcctttgtttctgtcacaatgtaaaacgggctgtccttcaatttgatatggggattgatgttctcgcaatgcagacttttggcgagcgtccgatgtttcagctgcatcaatactttgataacgcccgcaatgcctgctgcgagctccaaatgtccgatatttgtcttcactgagccaatcccgcaatatccgcccggagccccgtctgtttggaaagcttttttcaatgcattgatttcaatcggatctccgagcgccgtacctgttccgtgcgcttctatataagtgatcgttgacggctgaataccggctttttgataagcgcttttcagcacatccgtctgagcctgcgggttcggcgcggtaagtgacgctgagcgtccgccgtgattttccgctgtaccgcggatgaggccgtagatgtgatccctgtcatgctcagcctctgaaagctttttcaagacaatcatgccggcaccctctcctctgacataaccgtcagcctgatcagaaaatgttttgcagcgcccgtcttcactgagcatgcctgctttttgaaaaccgatatgcccttctggcgtgacgatcgtgttgacgcctcctgcgaccgccatatcacaatctcccgtttcaatggcttttaccgcgcggtgaatggcgactaaagagcttgaacaagcggtttctatcggctcgctcggcccgtggatatcaagaaaataactcattcggttcggcccgacggacggcacgattccggtcatcgtatacccctcgacaggaagacccgccttattgattaaggtttgatatccgcttcccaatgtgccggtgaaaatgccggtttttgttccggcaatccgttttgccgagtaccccgcgtcttcaatggctttccacacatacatcattaataggcgctgctgaggatccatcatttcagcttctttcggagatatcccgaaaaacagcgggtcaaacccggcgattccatctataaaaccgccccatttaattgacgttttatttgcatccgctgccggatcgccgtaatattcgcgccaattccagcgatcccggggaatttctgtgatgcaatgctctccttttgataaacgtgtccagaattcatctatgtctttcgcttgcggaaaaataccgctgattccgataatggctatcggttcggttttttcttctgattttccttttacggatacgggcgtttcccgtttgacatgaacggccgccggagcttcagcttttcttattccggcttttggggcggttttaaaattctctctttctaagccgctgaatgcttctttccattcagatatcaaatggccgctcagtttgcgcaatgtcggaaattcaaagaagatagtcgggctgagctcaagctgataagaccgatttaatagatttgtaaattcagtgaagatgatcgaatcaaatccgtattccgtcagttcgctgtcagcctcaatatctttcatgcttacctttaaaagatctgatacatgacgctttagtttctcttgaacccgatctttcagatctcctgcatctgtctctgccggagcttttgcggcggcgctttgttcttcacgcagatcgaaaacatggctgcgaatccgtttttcatctccttctgccaccatgatctggtgttctccggaggcaaaagcggcgtaaagcgcctggatgcctgaagccgatcgcatggctttcattccggtctgttcatacatcagccgttcggtctctttgtccacgcgcataccgccctcttcccaaagcggccagttgacggacagggtctgcccgctccgcttgttgtcccgcacgagacgatttcggcgggctgcatatacgtccataaatgcgttggctgccgcataaccggcctgccccgggtttcccatacctcccgccaaggaagaaaacagaatgaaaaagtccagccgcgcatctttcgctgcttcatcaagattgataagccctttcaccttcggcgccatgacggtcttccgttcgttttctgtctggttcagaatgtaattgtcggcgatcacgccggcgccgtgaatgatcccgtcgagtgttccgtgctcctcctgtatgccgcggacgagggcgatgaccgccgccctgtctgtcacatcaaccggttgatacagtacgcgggcacccgacgcttccaagcgccgtaagcgggcggagcggtctttatcaagcgcttccgcccttcccgttaatatgaggacggcgtttttgacgcgggaggctatttcttcagcgaaaatcagcccgatgccgcccgctcccccggtgaggaggtaaaccccttcgtctttccacggaacggcgccgctttgaagcgcaggcaggtgacgccagtttctgacgagacgtttgccggcttcataacggatttccgcttgttcagggtgcgtccggttttctttcagcttggcaagaagcgatgatgctggctcgtccggatcggcttggatgacttggccgtacagcttcggatgttcaaggtgagccgttttcaggaaagcggccagccccgccaatacattgtcttcccccctgtcggggacaagaagctggatcagcgtttttcccttctgtttttctttgataagacgcttgacgatcgctgacagctccgccgcgcaggcgtcataacggtcttcaatcggaccttccccgtcagccgcacatacggcgccgtttatgtcctcagcgttcattccgccatacagcgtcacgtatctgaaagactctgcttgtccgccgccttcacccggcggtgattcctgccactttggctgaagcaagagcggttttccctccgtttcctcttccagaaaacgggcggtgagccccgtcaatcggacgcatacctcgccgttttcatcacacagctcaatatgataggcgccgtccgctgaggaaagcaccgcccacatcgtctcccggcacgcagaaaacacctgcatatcccggagggcaaacggcagaaacggccgtccggacgcggaaccgtctgagagcacgagaccgatagaagcctgaagggcggcgtccagcatgctcgggtgcaggaagaacggctccttttcttcgcgggcggacggcggaagagtgagcttcgcgagcacttctccgcttccggcatagacggcgtcaagcgcctgatgagacggtccgtaggtgatgccgaggctgtcgaatgcttcataacactcagcctttgacatgtgccggccgccgcagcgcgcctgaaccgcctccacatcgagtaccggagcacgctccgtctcttcgagcacggcctttccctggaaaaagacaagcggctcttctccttcggcatacgcttcaaaagcgatgtctccgttttcttccggctgaagttttacatgaagcgtcacgccttcagaaagcgccgtcaccggacggagccaaacgatctgtttgagccggacacccgcttttccgcccggcaagccctcagcggcaagtgtaacggcggcccgggccatttctaaagcagccgcgcccggaagcaccggttttccattgacgatgtgatcggcaaaaaacggttcacgccctgaaaaaacagaagtaaagcgctgggcggtaaaggtcgatgtattcgcatggagcagcgggtgaagcttttcacgttcagctgaattccggctttcaagctctccctgaagacgatcggacgcccaatacgtctgcctggcaaacgggtagcccggcagattgccgattcgcggcaaaggtccgccataaagcaagtccccttcaatttcataaccttgacaataaaaatctgccagcacgcataacagttcctgatattttctatggtcagaatatgaagcgctgcacttgccgagcacttctattatgtgctcctgaatatgctgtcggcctgcaaagtgctgcggtacttttcccgaaaacacataaggatgatgttcattaagctttgcctgcttccatacatacactgcgtcatcagcatcttgaaccacgatggcggcgcgatggttaaagtgatgccgtccttttagcaacgtatagctgagctgggctagatcattttctttcagtccgccattttccgcccaagtgatcatatcttcgattttttcctgaagggcctcctttgtttttgctgataaagtcagtaaataagcaggggcatccggatgaggtgaagcgctgcgcttatagctttccataacgacatgggcgtttgttccgctcatcccgaatgcgctgactgcccccattcggtttttacccggcagagaaggccacgctttagccgttttattcacataaaaaggacttttctcccagttgatatagcggttttccccgctgcaatgcagactggcgggaatcatttcacgggagaatgcctgtaaaagactgatcaaactgacaatgcctgacgcggcaaacgtgtggccgatattggttttaattgatgtgagcgcgcaaaatgcttcttcgtttgtataggcagaaaatgcgtcataaagcgcgttaatttccaccggatcaccgagttttgtacccgtgccgtgtgtgacgatatattcgatatcttcagggttgatacggccccggtcataaacggaagtaagcagccgggtctgcgcgacgccgctaggagcggtaattccgtttgttttcccgtcataattgatgccgctcgcccgaatcaccccgtaaatcggatcgccatcttcttccgcctctctcagcggcttaagaacaaccgccgcagccgcttccccgggaaccaggccgtcagcccttttatcaaacgcgaagcatttcccgttttccgacagcattccggctttatctatcgtttcaaaaaagtccggggtattcatgatattcaccccggccgcaacagctgttgtacactctttattctgcaggcttaataccgcctgatggacagaaacgagccccgaagaacatgctgtatttatcgccatcacaggacctgataaattcaagtgataagccagccgcgccgccaaaataccgttatgatgagacgtgacattgcctttgtcccgtgttaaaaggtgataatctccttcttccgcacccacaaacataccgatcgtctgctgcctgatgtgactggcgccgtagccggcatcctcaagggcccgccacgcttcctgaagtagcagccgctgcttcggatccatcgtttcagcttccctcggcgatatttcaaaaaataaagggtcgaattcgtccgcccccggtacagcgccgagtttccattttgaacttgtgaagcctttttttgcgaccggtgcgacaacgtccttttcctgaaacagaatgtcccacagctcgtccgccgtgcgcgcctgaggaaagcggccgctcatgccgataatggcaatggaatcagctgcctgactgccctcggttccggcgttcagcttatttcttcccctctgcttctttcgcttttccgttcctgccttttcaaagacagattgatctgcggattcaggtttcttttcttcatagacatgctctatgacggacttgtgttccgtcagaaaatagcggacgaccttctccagtgtggaatgtccgaaaaacagggccggggtcacttcaattccgtagtgagcggacaaagaagaggcgaattccgccaaactgatagaatcaaagccgaaatcagccagattgtcagcatccgtcagtctgttcttgtctattttcaaaagccccgccgccagttccttcacatcccagcttacgcattcttccagtgtaaagcctttcatttcactccgccttcctgaaaacgggacgttcctatttacagaacccgaaatcggccgttcgccttgatctatctgcaggaagcgtttggccctcgacggaaaaccggccaggacgagatactggctggacggctggactaacaatgtttcaaaagcttcgagtccttcctttgtatataaataacgctgtccgcttgattttaaatacatatcggtgctttccgccgtgccgacatgcatccccccttctttccaaagcggccaattgattgcaagtgacttgccgcttctgagtccgaggctcacaagtttatcccggtggcggataaaagccatttggaagcggttccccattgcgtagtcacaagaaccgaagtctcctaaaatcgctgaagaagaagagaaacaacagaagaagtcaagcggctcccgtgacagaacctgatctaacaccgctgtgccgtccgtttttggcgataagacttgctgaaaggtttgcagatctttctccagaatgctttcagtgccttgaagacctgcagcgtgaatgacaccgtgaatcggcccgcatcctttctctttcgcttcttgcaaacctttctccatctgagcctgatctgcggcatccgcctgcacgtaaaacaccttggcgcctgattcttccaatctctttatcttgtgcagcaccgggccgcctgccgctgatctccccgtcaaaatgagcgtaaccggtcctttttcagcaaaatatccggcaaataacaagcccaaacctccgcatccgccggtaatcaagtacgtttttccgctttttatcacacgcctctcaacaggggcaatatccgtctgcttcatttccatgacgtgacggatttccccactgtacatgacactgcggaacgacccgctgtgaagctcttcacatacattatggatcagcttttcaaacggtcctctttgtccaaaataaaccgcggccgtatccgtctccggcaggatcagtttcagcgaccgttccagcccgatccatgactcggcgtaactgatatcggtttcggtcccgcactgagcggaaagaaggatccgcctcggtttagaacgcaaagaagcagctgcgcggatcacatgatacagaatggaatagtctttcacggccttttcatcttcaagcggccatccatacaaaacggcatccgccttgcctgcagccgtttcaatatgccgaaacgtttcttgatatgcttgtccgtcagtgattttaatttgataatgcgtgtttgaaagcttttgagtttcctcaccctgtgaaataaaaaacacgccggctcccggataaagggattgtaaagaccgataagcatgttttctggcagcttctcccgtaagaaaacagatgaccgttttcagctcttcatgaatggatttcttcagaggctgctgcgtccacctttcttcaaatatcatcatctcggagtgttcctcttgcccgtgatcctgctgagacggctgtctcattctcacccctttgatttctgcgcatacaatgccggtttcgtcacaaaattgaatgtcacagccggtttgattctttttattcatatacatccacatgccggatgaacacggacgcatgacgcgcagttcttcaaccgtttcaggcacgatatggactgacggctccgtttttgccaagacatgaaaagctgcgtccagaaattccggcggtagatgatatcccggattacggccgctttcatctgtaagagcaagcttcgcccaaatcgcattttctcccgtataaagcttttcaacggtgcggaactccttactgatcgttacacctgatgtgcctggtgtttcataatcgaatgacagcgggcgacagtctttttgtaaggaggcaatatcaagcatgcgggatggctgtacgttcccttgaccgatgattccataatgatgcagcttctcttcatcactgtatatttcataatggatgccttcctcgtcttcagacagaagggagagattgacgcccgcaccgtgatgtccgccggtaatcgggtcagtccatgccgccgttcggatccatatctctttttcttcagagctgtctgccgcatgatgataagccgcaagcgccatttctaaataaacggctgccgacagaacccgctctcctctcacatcctggaaaacgtgttcccggcctgtaaaagatgtatgatagctttgctccgccaaggttgacgtattttcatgcaggaaaggatgcacatattcagttgttcctgtttttggttcttcccgcttcatccagtagctttcttttgcaaatggataagacggcagactgatacgatgcggcagcgcgcctttatataaagatgcccaatcgacgggcgccccgtggacccaggcattcaaaagactgccaaattgacgtttttccatccaatcaccgactgtgccttccgtctctgtgacagcactatcactccggcccgtaaacaccccgcttacggaatcggcattattcagaaaagcagtcagcttctgttccaattcagaaacagagtccgctgtcatcgccagccgttcttccatctgaaccctgccgacttgaagggtaaatgccgcgtcaagcagatttgcatctgtaattgttccgtttccggcggcatccgacagcaacagagcccgctcgcgcaagcggtctttatcttttgccgataaaacaaaaagcgccggacggccggagtccgccgaagtcatttcagccggttcatactcttctatcagcagatgggcatttgccccgcccgctccgaaagaagatgtacccgcgattctcggatattcccgtgttactccttcagattctatgaccggccgtctccattccgccgtttcctgctgcacgataaaaggagaagtttcaaaatcaatttccgggttcagctgctttgaatgcagcgacggcaccagatatccgtgtttcatctgaagaagaattttggtgacggcagcaatgcccgccgcactttccaggtgtccgatattggatttaacagaaccgatggaacaaaattgctttgcatccgtatagcggcggaaagccttggttaaccccgcgacttcaatcggatctcccaaggaagtgccggtgccgtgggcttccagatagctgatcgctctcgggtcaattcctgcccgctccatcgcgtctgcgatcacttccccttgtgcattcggattcggaacggtgaacccgttcgttttgccgccggcgttcagagcgcttcctttaatgacaccgtatatatgatcatgatcttcaacagccttcttcaacggctttaacacgatacagccgacgccctctccgtcaacaaacccgtcagccttatcaccgaacgctttgcacgcgtttgacggcgacagcattctcatagaagacagtccgatataatgaaccggatctgtaatcaggtttacgccgccggcaatcgcgcattcagatgcacctgttctgatgctttctgcggcgagatgaatggcggttaaggatgaggagcatgcggtatcgaccgcgatgctcggaccgtgaaaatcaaacacataggatacgcggttcgggataaagtggtagtgggcccctgtcggatagttgccgttcatgacacccgcaaaaacaccaacctttttaccggcgcatagtgaatcaggggtatatccggcatcctcaagggccgcataagcggtttccagaaacagtctctcctgcgggtccatgcgctccgcttctttcggggagattttaaaaaacagcggatcaaatttatcaatgtctgttaaaaagccgccccactttgtatacatccggccttccttaccttttgtctcatcatagtagtcccgccaatcccagcggtctttcggaatttcggtgattccgtgttcaccggtttttaaccgttcccagaactcattaacattttcagctccgggatacttcccggcaagaccgacaattgccacttcaaggtgttttgacggcggttcggaggcgggcggcgctttttcagaaaaagatgccgcttggcgcttcgtcaatccggcgctttttttgcggctttgctttttctgtagagtgtgcggcaccttttcggcttctttatttgtcttgaaaatcccagccatatcttcctgtcttgagctgacgagatattccgctaatccgccgattgtcggatactcgaagaacaatgtgctgctgatatcagggacgtcttcccgcacgcggttggtcagctgtacgattaagatggaatcaattccgtattcttcaaggggcgtatgggcttgaacgtcctcaatcggcatctttaagatgacgctgacgatctgtttcagatactctgtgcttttttcaagcaaagagcctgatgataccgcttcagtatgacggacttcttcagaaaatcgcgcaagcagttcgcgctccttcgtttcagccaagtatgcggcaagctcttctatcgttcggtgttcaaaaaacagcgtgctgctgatatcagggacgagatcccgcagctcgttcgtcagctgaacgatcagaatagagtcaataccgtattcatccagaggagccagcggatttatctcttctgccggcatttttaatacttttgccgcagcccttatcagaaaagcagctgtcttttccgaaagcccttctcccgcttgtttgatggggagctgacgatcagagaatgttcgcggtacgtttgattggcgcttttgcgcggtgtaagcttccctgctctgcctgatgactccgttgcttttcgccgtgataatctgctgggtgtgcagacgttcgttttcagccggaaattgaatggaatgaaagccttcagccattaaaaccgatttccatgtttccggataaagaccggggcaccccggaatccgcagcgcctcgtcttcgtacagccaccagccctctaataagccgaatgtaacatgtgtaaacggcgtatgtccgcccagttcattaacgagcagcaaaccgtcttttttcaatacggcttttgccgtccgtaaggttttccggatatttttggtggcatgcagcacgtttgcggcgatagcgatatcgtaggttctcagatgtaatccctggcccgccgcaggcttctccacattaaacagctgatacgtcaaatacggattgtccgcgccgtattccttttcggcatgcattaaaaaagcttttgacaagtcggtataacagtattcctgaatatggttttgataggggcggagctttttaaacagtgtgctgctcgttccgccggtgcccgctccgatctccagcagacggatgtttgcctcaggattgtttttaattacattttccacataaatacacgcttcatttgccatcacatcgttgtaataatcagcgagaatgttatgcttatagattccttcaacgagctccattgaagaatcgggaaacatcacgtcagtggcttttattttgcctgttaaaatgtcaggcaaagcttgaatgacggtatccgccagcagagcctgcgctttcatatccggatctttcagccattcgtttttcttcttatgccactcttcccaaatcgcggccgtttcaccgcttttaagatcgctgtctaaaagacggatgctttcttccagccagcgctcatataaaggcagacaggaagccgccggcgcttcgccggtcagacccattgaacgcagcgtcacccgcagcacttgcagcaaaagctgattcaattctttcatttgattgcttatttctgttcttaaggataactgtgtacggtctttttgtttgtctcccttacccaaaaccttatcctcctaagaaaattaaatttgctccgtcattttgacaggcaatcagatagtcacaaattcatgagggttcattccctcgatcggaatcggcttggtcagcttcatcagccccatgcgggagatcggctgcgtcagcagagtttccagcgcctgcatcccttccgcccggctgatcagtccgagaccgattgcactcagtctgtcaaactcttcagaaatgtgattgtcagcccgctcccaatacccccagttcatcactttgaccgggcatgacagccgcccggaaagctcatgggcaaatgcgtctttaaatgcgcaccccgccgcataatgactttgattcggattcttaatatatgaaataaccgaagagaaaaagagaataaagtccaaagactctttcgcaaatacttcggcaatgttgacggaaatatccactttcgccgcaaggccggcgtgaaactgtgattcttccatatcttttacgctttcattcgcaaataccatcgctgaatgaacgacgccgctgatggtgccgtatgtgtttttaatctgttcataggcgcgctgaagcgatggaagatcagaagcatctgctgctatatattcgggagccgggcctgatggccggtaccggtctattttttggcgtatccggctgtccagcggccgcctcccgatccagacgactcgggctttatacgccgtcaccatataatctgtccaaacctcgccgatgcctcccgcaccgccgatgatgacatatacgcctccatatcggtaaggaacactttcagacggcccgctttggaccggaagcaattgaggccggtgccattcctgatgtctgcgcacccatgctttacccgtacggtcgcggggcaggctgaatatgtcttctgcagggaaatccccccgtcttcaagatcgaccagacggatgtgccagctcggatgttcttttgcgagagacccgacgaaaccgtgcacactggaatgagcgggacgcacctcatcatattgggtgataggctgtgcttggtgcgtaatcaccgtcatcccgagctgctcttttccatacccgagaccgataagagctttggccgctctgaaaatttgcagcaccccgcttttttgatcatggatgtaagaatcagccggctgaggggcaaaccagatcatatgctgaatctcaccgacacggcggagccgatcggatatcacttcaacggaagcactttggctgctatcaaatcgcacagctttaggaaacaatcgtaaaaccgcgtccgcctgcccgtctgtaccgcctatgatgacagcttttgcttcagaaatggggaagccggtttggttgtctatcggttccgcgtcccatacctgcatcagtttgacggctccggtaaggttacccggcagatcgtattgcttattatcggttacggccggcgcactttcggccatccgggcagaaaatccttttattcttacacacacattgccgcgttcatcacatatatcaatgtccattcttcgcacggcccgtgtttcatgcgtcacaaatacggccgcccacatgtttggactgcacggatgaaaaacggtcagttcatgcaattcaaaaggcattaacggctgctccggataacccgctttatcttcattcataacgccgatggccgcctgaaaagcggaatcaatcagactcggatggagcacaaactgttcggcctcatcacaaacggaagcagggagcaccaatttagccaaggcttctttttccccgcaataaatgtgatcaattccttgatgtgaaggtccgtatacaatttccgcctttgcaaatgccgcatagcagtcttcttttgacagcacttttttgcggcagcgcgctttcagctgttcaatatgcaaaaccgccgcctcagacagcggctcaatcacagcactgccttcacaataaatgtctgaatcgttttcattgctgtacacttgaaatgaaatattgccgttatcctctaaggaaagacctgtcgtcatacgcagcggctcttttttatgaacggcctggcgtatccagctgatataccgcagcgaaatgccggttttagccgtgtattcagcggctaacggcgcggcagccagttcagccgcggctctcgccatttcaagataagccgccccggggagaacacgcttgtttcggacgatatgatcggctaagaagaattcatctccgttcagtaccgtgctgaatttttgttctaacaaatctgatgtattgcggtgaagcagcgggtgaagcctgctttctgtatttacggaagtgacgggatgatcgggctccggtatccaatagcgctccttcgcaaacggatatgtcggcagactcatcctgcgcggtttctcctcccgatacagccgcgtccagtctatctcaaatccttttgaccacagctccgcaagttttttgtaagtgccgctgtccgtccattttcggatcagctcctccgtatcctgatcatcattcaggaaacccctgatttccgttccgctatcagaccggccttgaaagcagccgtcaatctgccgttttcgttctgtaaattcggttaatttcctgatcaggtccgcttgatcgttcactaaaaaaacaagccgttcttccattgccagccgtcccgtttgcagcgtatacgccagtgaccgcagggaaaaaggttcatcagactgcttctctaagccggactgaccgaaaagaccggaaagaatattcttatgtttctcatcgtttgtcagacattctgctaaagtccggacggaagtatgctgtatgagatcagtcatgtctattgccagcccgtattgatccgtcagccgctcagaaaactgtgtcagctgcatgacatccaagccgaattccttccaatcctgttcaccatctaccgagccggcctctacatgcagaacttccgccagagcaccgcgcagcgcattttccagctgattttgcattgtatctgttttgtcataaagcgacccgcttccttcaagcgctttatctttgagaaacatcagcaggcgggcagcgtattccttcagccgctccggatttttcgctgatagaggcacgatatacggtctctcttgattctccgtaatgccggggtttttgggcctgtactcttctaaaatgagatgaacgtttgaacccgtcgccccgaatgaactgatgcctgcgcgtctcggacaggaatgttctctgccgttctctgtatacgccggctttttccatgactcggttttttgctgcacgtaaaatggcgagtcctctaaacggagatacggattaatcgtctctgagtgcaaagaagggacaagcgttttgtgaaacagctgcaaaaccgttttatgaagcccgctgattccggcggctgactccgcatgtccgatattcgatttaacggaaccgatcgcacaaaattgccgatcctccgtaaacgtgcggtaagctttaacaagaccttgtatttcaatcggatctcctaaagaagttccggttccatgcgcttccacataagaaatcgtcctgggatcgatccccgtcttttcaagacattcagctatcatatccccctgcgccactgggctcggcacggtaatcccgctgacggttcccacgtgattgacggcgctgccttttatcaccgcataaatatgatccttatcttcttcggctttgtgaagcggcttcagcagcacggccccgatgccgtcagctgagacatagcctgtgccgccttcgccgaacgtgcggcacagcccgtcactcgaatgcatatccatcaagccgtatgtgatatattttgtcgggtgcaatgataaattgacgcctccggcaagagctgcttcacattcaccgcgtctcagactttccgccgccatatggacggccgtcagagatgacgaacacaccgtgtcaaccgccatgctcggcccgtgaaaattgcagaaatatgaaacccggtttgcgatcggcgcatagttcaagggataaggaaagaccagccctttggccgcagcttcagcgccggcgagagaataatccatatgcatcaccccggcaaacacaccgacgttcattctcttattcggccctttcggctgaacgattgtttccggggtatagcctgcatcctcaatcgtttcccagcatgtttctaaaaacaatcgttcttgcggatctttagcttctgcctcccgcggagaaatccggaaaaatttcgcatcaaaacaatccggatcgtctataaaaccgccccatttggaaatcggcttgccggacggcgatcgcaaatgctcatatttcctcgtatcccagcgggaacgaggcacttccgttacgctgttttctccattttttaaatttgcccagaattcacgaagatttttggcgccggggtaccgtcccgccatcccgacgatcgcaatatctccattctgcgttccggctgacgccgattttttcacgcggttttgggtcgtcctctttttttcccggcgcaaaggttcagcatttggatgcccgctttgagcatggccgaagccggctccgtaatgttcgcgcaaatatcccgccaattccgcgattgtcgtgtattcaaataacagcgtcggcagaagctgcgttccgatttttcgttcaatttcctttaccatgtccaacagccccggagaatccagccccatttcatagtagccgatatccgggtcaatctctttcacaggtttgttcaatcgggcggcaagcaattcttttaaataaaggatgcactgttcagtaaggccggcggaagcctccgcacggcggggctcggaaggcgccggttccgcttgcggagccgggacggcattccgcccgtcaggttctttcttttgccgtttctgattgatcagttccgggtccctcacccgtttattggcgaagtttttcagttcgccgacttttctgccttcctcattgaaaaactccattgtcacgtaaacgagatctttcttacgtgtgacggattctttttttatcttggtgatacatgtcgtctgcagcaattcggcgcaataaaatgattcataaaacagcggcagaaataattgcccctcctccctcgtcaaaggagcgagatatacattggagccgatgctgctcgcatctatcaatgcgggatgaaacatcgcctcttctgcatgttccagctgatccttttgcaccgacagatcaatataaatctctttttcagtctggtagacgcttccgcagcctttcatcattcctgaatgaaccagttcttgatccctgcattccgcgtaaatatcctcaagcggtatttctgccgccgtttgttttacggcatccatccggacgctctcttggaagccggcgggcttgacggaatgcatttgcgccgcggcatatatctttgtctctgctgcttcgtcaccttgtttttgccctttcacctctaccttccactgcccttcgccgttctctgtacagtcaacggaaagcaggattgtttctccctgttcaggagctaaagggtgaaaaatcgataagtgcctgagttcaaggccggcatgaaaaaaaccgttttctctgaaagtctgatagatcaggtcaatataagccagacccggcagcagttcctttccataggctttatgatgtttcagaacgggatgctgattgttaataagaagctgctcttgcatatgaacttcctccatatcgacgttcaattttcagcgcaatcagtaagtcttcatttgtttccaaaacgtattcgggcgggattcatgtgcgttttcatgcaggttttcagctttgtccggacggatgggccggcgttttaattcctgtctcggcaaaggctttctaaccggggtatacgcctcctgctcccaggcttccactatgacatgggcattcgtccctccgtcagcgaaactgctgacggcggcaatccgcggtgaatccgtccattcacgcagaacgtgcgaaaaataaaacggcgaggcggacagatcgtaatgcgtcatcggctctttgcccgaaaggaaaggcacacgcattcggcgcgagagcataagcactgttttaatgaatccggcaatcccttcagcgcataacgggtgtccgatattcggcttcatcgaccccaattcgcaaggcgcgctgttttgcatacggtacaccgcttcaatcgccctcagttccaaaaggtcggttacttcagagcctgaaccgtttgcttcaatgtagctgatatcctccgcttttctgccgcttttggcaagcgccttggccatcacttctttctgcgcctgtatattcggtgtggcaggccccgcggttctgccgtcattgtttacggaaatgcctttaatgaccgcatgaatccggtccccgtcttttacagcctgggccgctgtttttaaatacaccattccgacgccttctcccaatacgatgcctccggtgcggcggtcaaaaatatgaaacgcaggctcttcgcttaacagattgcgaagttcgaacatccggtgggtttgaccggattccagcagactgactcccccgaccaccgctgagtcgatttcaccgcaagaaagcgcctgtatcgccatattcataccgacaagcgctgaagaacaggccgtatccaaaacgagactcggccccttcaaatcaaagaactgagaaagattggccgccaagtaattcgggccggcggcgactatcggattttttgcatgcttcagacggttttcgtcaggcatactgccgccgcgtcctcctaaatagacaccggctgacctgcctttcatttcttgtaaagagtaaccgctgtctctgaacagatgaagcgcctcttctaatataagaaaggactggatatccattgccttgatgtcttcttcgggaataaggaaaaactccgggtcaaaatgcgttacattttttaaaaggcccgcataatccgccttctccgttttccagcgttctttcggcaccctttgaatagccgacgacccttcagacagcagcttccaataagcttcaattgattcagctccaggaaaacggcaggacattccgacaacagcgatgtcttgcgccgctgcagcgccagaaggctgaatgacagcggctgctgtttgtttgggaacgtccgggattacaggctgaaccggttttgaaacggcagctttgatttccggatatgccgtttcaagccatcccgccagcgcagcaaccgtagggtattcatacagcaccgccgggtcaaggtcagctttgatcctctttccgatcgctctggacacttgggcaagcatgatagaatcggctccgtaatcttgaaacggtgtatcagattcaaatcttgacggctccagtcttaattcccggcagcaaatgcccgtcagccactcctctacgctttctgtctcaccctgtacatgctgctttgtttcggtaaggccggttgaaagcatcagacggtcgggctcccatttttccgggtgaatgacggccggcataataacagatccgcaatcgcctgccataacggcatcaaacaggctcagcccatctctgtcagtgatgctctttaaaccgcttttctgataggcccggctttttgattcgcccatacccgtttctttccagctcggccattggatgctcagcaccggaaaaccttttgcggccgcaaaataatccatataggcgttagccatggcataatcgctttgtcccgctcctaattccggcatcacgccggacactgaagaaaacagcgcaaaaaaccggagaggctccttgtgcagcgcttgatacaaaaggtccagtccgtcagttttaggttcaagcacagtcatcatctgttctcttgttttgcggataaaggcgggatgatcgagatctacggctcccgctgcgtgtatcacgcctccaatcggtcccatcttctctttcacccggctgacggcctgctcatattcagggccggaagatacagacagcacttccgttcggacacctttttgttcgagctctctgattcttctcactttatcggaaaacggggaattccgtttgatatgatcatcccactccgctttcggaggcattgtttcttttccggtaagcacgagtttcgtgactccgtaacgttcggcaaaatgccgggcgaataaatatccgagtccccgggtccctccggtgatccagagcgcatggtctttcggaaatgaaaattctttttcagctaagctgtttgtttcctttaaccgcgcgtgatagcgcacaccgtttcggtaacacacttcgatgtctgcagaatcgcgaaaaaactcctctgcgatctggtttgccagctcggaatcttcggcagtccgttctgcatccatatgccgcgagcggatatccttatactcactttggagcatccggtacaatccggccttttttgcacctgagagatttatcgtttcattcgcaaaaggttcaagcccctttgtcacacaaagcagctgtagctttcggccgcggtttctgttgtcgatgagagactgcagacgatgaatccagccgtcatcatgcttgatttccgtcccgcatcccgtcacatcaatcagaccgccaaaccgggccgcgtccccggatatttccggtgatgcagcgtcaatgatttcagactcggggaaataacgggacagctcaacggccaaatttcctgtctggtgatcagcggctattccgatgacgccccgcacttccttagccggaacacggctgctttctgcccagcttttctgtaaaaagcggaattcacgaaatgtttcagaatgtgtttcagcaccgcgaacattgtccggcgctgcatcgtccggccaataacgatcctttataaatggataaccgggaaggctgacgcgatgcggcaggctgccgttataaagctctgaccaatcaatcttcagcccttttacccaaagttccagaagcttcgcgaatttttttcttttcatccatttacggacggcttcctgcatatcttcatccttaaaaacggctagaatatctttatactgtttgctttttcccctgaagcagccgtctgttccgccgtcaataaaacactgcagtttttccgctaactgctctgtcgacgtcacgataaacgccgcacgttcttccatcgcttctcttccggtttgaagggtgtaagccgcatcccggaggctgcggtctgtgacgtcattttttctgatcgcttgaagaagctgctgcgcccgctgcttcaggctggcctcctgtttggcggataataaaatgactgcgggatcttcatctgtgaatggctcagaaatctccctatcaggttcaatatattcttctatcaatatgtgggcatttgccccgcccgcgccaaaagaagagattcccgcgattctcggaatctctttctgcgctccgttttcctcaatgaccggccgtttccagtctgccaattcacgctgcaccgcaaacggcgtccggtcaaatgcaatattcggattcaagcttcggcaatgtaatgaaggggccagctttcgtttttgaaactggagcagcagttttgttacaccggcaatgcctgccgcggcttccaaatgcccgatattggatttaactgagctgatggcgcaaaagcctttatctgacgttttcgtttgaaatgcgcgggtcaaaccgtcaatttcgatcggatctccgagttcagtgcccgtgccgtgggcttcgatacagctgatcatccgcggatgtattcctgatttttcaagcgcgccggaaatcacgtcagcctgggcgctcggactcggcactgtatacccgtttgttctgccgccgtgattgatatgagtgccgcgaatcaccccgtaaatatggtccttatcagccatcgcttttgacagcggctttaacagcacggtcccgacgccttccccgggaacaaatccgtccccgccttcaccgaaacttttgcacgttccgtcttttgaaagcattcgataggcgctgagctccgcataagccgaaggatgcgtatacacattcacaccgccggcaatcgccatgtcacatgcgccgcgaaggatgttttcacacgcttcatgaattgcagtcagcgaagacgagcacatcgtgtcgaccggcatgctcggccctttcagattaagaaaataggaaactctgttggccgctgaactgaacgacgttttcggctgcagggtgccgccgtttttccagtacattccgtacccgtttttcgtaatgccggcaaaaacgccgacccggccgttatacagattctcaagctgttccttcgtataaccggcatcctccagcacctgccagcacatttcaataaagagacgctcctgcgggtccatattcaaagcatcacggggtgaaatttgaaaaaacagcggatcaaagaaagcggcatctttcagaaacccgccccgcttactgtaacttttccctgctttcacggccgcttcgggatcagggttgtagtacctgtccttttcccagcgctcttcgggaatttcggtcacacagtcttttccggccgctaagttatcccagtactcttcaagtgtttcagcttgcggataacgtccgctgactccgataatcgcaatcccttcttttgtctgtttctcattggaaaaagcaggccgttttcttcgcttgataaacgacggaagcaccggaaaatcttcatttgccaaaacctgttctgatatgcctgaacggtgctcatcatcatttgtccattttcggcattcattcggataatccgtgacaaagtgagctgccagggagcccagtgtcttatattcgtaaaaaaccgttttggaaaggtcaccgaaaagcagagacaattcgcggttcaatttcgtcacagtgacggagtcgattccgtaagtttccagcggctcttcagtatctatgttggaaacagcaatttttgcagtcaggccaaaaagcgttttgagctgaagaagcgtttgttcatacaaacgttcactgcggtgttcggcattggtttttccggaagcgcccgtcttgatgacaggctgcagcttcaaccccgacagagaagcccatatttttccttctccgtcacataaatcaatataaaagctccccgccttctcttgtatctcggcccataccttgtcaggacaagattcataaaacaaaagctcgtccaatgaaaccggagcgagcgttttatattctttgccgccaagcagcgcgcatgcctctgtcacactttgcatcacacagggagggaggccgaatcgggcggattctttttggtttgtcaatggaattgatatgtctgccagcatccgtcctgatgaagcgtaaatacgctcaattcctttcatgtgctcactgtattgaacggtatcgttctgagtgatggcttcaatttgctgcttatccatcagggaaccgctgttttccttcaagcggctgatatccagcatgccgggcgcagcatcaactggctgaatcgtcccttggctgtacacatcataatgactggaatcagcagaaaatggattataaatctcaaaccttttggcttcaccctctgcgggtatcagcctgatttcgatatggaacggctcagcctcagtcagaatgggctttgaccacacgatatgcgtcagccggacagccgcagtctcctttactgtcaaaacagccgcagctctcgccatttccaaaagaagttctccaggcataagctttttatgctgtaaagaaacatcagcgagaaaaaattcccggccgctgaaagctgccgagaatccctgtcccgtttcatcggaaatatgctgctgagcaagcggatgaagggaatccgtttggcgaagtcccatccgcatatcataatcgcgcaaaatgccgatcgcatcctgttttgtcatttttttatttttgacgtcagaaaaaacccggtgcagaaactctttcatatggtttcctccattacgctaatccctgtaaaaaccgatcgttctttttacagcggcttctatgcttatttcgtttttctccaattcatcaagcaggcgctcataagtctcaagcggggacgtatcagtcccgtaagtctcccggtgccttatatgctgcgcactgtgcggtatccagcaatgtgttttcgcaaaaggatagacaggcaggctgacttttttcggtctttcgtcctgatacaatttactccaatcaacatgcaagccttgcacccataattttgcaagcattgcatactttcctgcttcaaaccattgatctacggccccgctcatttctgcattgtccgtcatctctgtaaacagctgtttcatcgctttgttccggcctgtaaagaaattctgccccgtctccttgccgctgaggaaatcattcagcgcgttcgtaagctcttcttttgtttcagcaatgacggcaaggcgctcttccatttcatcccggccaagctgaagcgtataagcgatatccgcaagagctccgtcagctgaatgtgacttttccaaatatctgcgcagctgttccgcacgttccttcagctgttccgccgtctttgccgagagaatgaataaggacggctgaagttcaccggccgtccattgtttctcttcaacaggagaaacatattcttcgagcacgacatgagcattgacaccgccaaatccgaacgagctgacacccgctctccgcggcagttcatttccgctatcatcagtcgccgctttccacggctgagtttcgcggacgaaataaaacgggctgccgtcgaggctgatatacggattaacggtttcacaatgcagacttttaacgagcgttttgtgctgcatctgcaaaataatttttaaaagtccggccatgccggcggcaagctctgtgtggccgatattcgttttgacggaaccgaggccgcaatgaggctgatcgggtgccgttactccggctttttgataaagcgctgcaaaagccgctttgagtccgttgatttctatcggatctccgagcgccgttcccgtgccgtgggcttcaatataactcactgtacgggggtcgatgttcgcttgctgatacgcttttatcatgacttctgtctgcgctttcggattcggcgatgtaagggaagccgcccttccgccatgattttccgccgttccgcggataacggcataaatacggtcgccgtcacgttccgcatcagataatgttttcaaaacaatcatgccggcaccttcagctctgacatagccgtccgcttgatcggaaaatgttttgcagcgcccgtcttcactgagcattcctgctttattaaagctgatatgcatgtccggcgacacaatagcattgacgcctcctgcaatcgcgatgccgcagtctccggcctgaattgccctgaccgcacggtgaacagcgaccaatgagcttgaacaggcggtttcaatcggttcgctcggcccatgtatattcagaaaatagctcatgcggttcggaccgattgacggaaccgttccggcagcggaagaaccctcaatctctatatggaactttgaagcttcctgagcgtaaccgctgtttgtcgtgcctgcaaaaatgcctgtatttgtacctgacaggctttttgcagagcagccggcatcttcaatcgctttccatacatgcatcattaaaagtctttgctgaggatccatcatttcggcttcatgcggagaaataccgaaaaataaaggatcaaattgagcggtttcatcaatgaagccgccccactttacattgctcgcatttttatctttctgcggatctccgtaatactgtctccagtcccagcgctccggcggtatttcagaaatacagtccttttctccggctaaattctcccaaaacatttccggattttcagccattggaaatgcacagctgattccgattatcgccacgggctcttcaggttcagctgcggtttttgttttaggaaggcgggacggaatcgagaatggctccgtcttcatttttttacgctcaaccggtttctccgtttctgtttcttcctgtgggccgaatgtatccggatgttccgtcagcaagtattgggcaaaactaaagactgtcgggtattcaaaaaacacggccggcgtcagttcaagcccatacattttatttagttcatttgcaaactgcgtgaatgaaaccgaatcaaatccataatctctcatctctgattcagcatctatttcttcttctttcaccttcagaatgcctgatatcatatgtttgagttccgcttgtactttatttggcagatggacgtgggtcttccttgacacatgaatgctgcgtgacggttccggcgcttcaggcatcaggttttttcgaatccgtttctcgtcgccttctgccaccatgacctggtgtgctccggaggcaaaagcggcgtacagcgcctggatgcctgaagccgatcgcatggctttcattccggtctgttcatacatcagccgttctgtctctttgtccacgcgcataccgccttcttcccaaagcggccagttgacggacagggtctgcccgctccgcttgttgtcccgcacgagacgatttcggcgggctgcatatacgtccataaatgcgttggctgccgcataaccggcctgccccgggtttcccatacctcccgccaaggaagaaaacagaatgaaaaagtccagccgcgcatctttcgctgcttcatcaagattgataagccctttcaccttcggcgccatgacggtcttccgttcgttttctgtctggttcagaatgtaattgtcggcgatcacgccggcgccgtgaatgatcccgtcgagtgttccgtgctcctcctgtatgccgcggacgagggcgatgaccgccgccctgtctgtcacatcaaccggttgatacaatacgcgggcacccgacgcttccaagcgccgtaagcgggcggagcggtctttatcaagcgcttccgcccttcccgttaatatgaggacggcgtttttgacgcgggaggctatttcttcagcgaaaatcagcccgatgccgcccgctcccccggtgaggaggtaaaccccttcgtctttccacggaacggcgccgctttgaagcgcaggcaggtgacgccagtttctgacgagacgtttgccggcttgataacggatttccgcttgttcagggtgcgtccggttttctttcagcttggcaagaagcgatgatgctggctcgtccggatcggcttggatgacttggccgtacagcttcggatgttcaaggtgagccgttttcaggaaagcggccagccccgccaatacattgtcttcccccctgtcggggacaagaagctggatcagcgtttttcccttctgtttttctttgataagacgcttgacgatcgctgacagctccgccgcgcaggcgtcataacggtcttcaatcggaccttccccgtcagccgcacatacggcgccgtttatgtcctcagcgttcattccgccatacagcgtcacgtatctgaaagactctgcttgtccgccgccttcacccggcggtgattcctgccactttggctgaagcaagagcggttttccctccgtttcctcttccagaaaacgggcggtgagccccgtcaatcggacacatacctcgccgttttcatcacacagctcaatatgataggcgccgtccgctgaggaaagcaccgcccacatcgtctcccggcacgcagaaaacacctgcatatcttggagggcaaacggcagaaacggccgtccggacgcggaaccgtctgagtgcacgagaccgatagaagcctggagggcggcgtccagcatgctcggatgcaggatgaacggctccttttcttcgcgggcgtacggcggaagagtgagcttcgcgagcacttctccgcttccggcatagacggcgtcaagcgcctgatgagacggtccgtaggtgatgccgagactgtcgaatgcttcatagcactcagcctttgacatgcgccggccgccgcagcgcgcctgaaccgcctccacatcgagtaccggagcacgctccgtctcttcgagcacggcctttccctggaaaaagacaagcggctcttctccttcggcatacgcttcaaaagcgatgtctccgttttcttccggctgaagctttacatgaagcgtcacgccttcagaaagcgccgtcaccggacggagccaaacgatctgtttgagccggacacccgctttcccgcccggcaagccctcagcggcaagtgtaacggcggcccgggccatttctaaagcagccgcgcccggaagcaccggttttccattgacgatgtgatcggcaaaaaacggttcacgccctgaaaaaacagaagtaaagcgctgggcggtaaaggtcgatgtattcgcgtggagcagcgggtgaagtctggctgctttctcactttccgctgagcctgttttgtcaagtgacacatcagcttttgtgacccaatatcggtctttggcaaaaggataagccgggagactgatgcggcccgggttgcgctgataaagagctgaccaatcgacgtcaagtcctttaacccaaaggtcaagcagctttccgtatttcccttttttcagccaggcatttatggtaagcgccatatcttcatcagaagtgagcgaagccgccaatgaatgatgtttggctgtcctgccccgccagatatgagcatgttcgatatgatcgtttgagaaactcataagcttcattttcagttcttctatcgactcggccgtaaatgcaagccgctcagccatcggttctcttcccgcctgaagcgtgtaagcgattttggccaaatccccgtcagaacgtttttttcttatgacatcatccagaagctggcgggcgcgctctgtcaattgctgctcatttcgcgctgataaaataataacagccggtttttgcggagaaacagacgcgttttcccttggtttcaggctgtcagacggcacatattcctgaatgatgatatgcgcgtttgcccctcctgctccaaaagaggaaataccggcaattctcggatattccttcatttcacccgtgatattcaagacaggtcgtttccattccgtttctttttgctgtacgaaaaacggagtgtgctcaaactcaatattcggattcaattccgccgcatgcaatgaaggggcaatcctcttatgtttcaattggagaagcagtttggtgattcccgcaatcccggcagcgctttctaaatgtccgatatttgatttaattgaaccgatggaacaaaactgccggtcttctgttgtcaggcgaaaagctttcgttaacccgtcgatttcaatcggatcaccgagcgcagtgcccgttccgtgggcttccaagtaactgaccgttctcgggtgaatgtctgtccgtttcaacgtctctgcgatcagatcaaactgcgctttcggattcggcaccatataagcgtttgtcctgcctgctgcgttcagcatgcttcctttgataacgccgtaaatatgatcgccgtctttctccgcttgagcaagcggctttaacacaatcgcccctactccttcaccgtcaacaaaaccgtccgccctgtctccgaaagatttgcatttatcaccgggagacagcattgaaaaagcggacagccgctcatagtgagccggatcaacgataagattgactccgccggcaatcgctgtttcactcattccgctccgcaggctttctgcagcgagatggacagctgttaaagaagaagaacaggctgtatccacagccatactcggcccttgaaaattgaacaaaaacgatactctgtttgcgatagaccagtcgctgggaactgtcgggtaattgctgttcatcacaccgacaaagactccgattttccggctgtcacaaagcgtggccggggtgtaccccgcatcttcaatgcttgaataagcagtctgcagaaacaacctttcctgcggatccatcctttcagcttccgcgggagatatacggaaaaacagcggatcaaatttatcaatgtcatcgaggaaaccgccccattttgaataaatggacccccattttccgcgttcctcgttataaaacgttttccagtcccagcgatctttcggcacttctgtaatagaatgcctgccggcttttacattttcccacagctcatcaacgtgatcggcgcccggataccggcctgacagaccgatgacagcgatatcctggatatagggatctccgtttgtcctgctttcttcctcgttttgaggaattacattcaggttatctgtgtgatcagacagctgctcctcacgcacacccatcgctttcataaatgctctccgctgagaaagaagcaggtaatccgcgatttcttctatcgtctgatattcaaaaaagagggtgctggtcatttggtcaaacacgttacgaaaagcatttgtgagcctgacgaccagaatagaatccaaaccgtatgcggttaaggaaaccgacggatccattctcctgctcggaatctttagcgtttttcctattaattccgtcagatatgtgatgccccgttcccttacgtttggaatcggcgcggcgctttctgcgggagcctgcatccgtccggcgttttcggaatgagcccgtccattcccgaattgccgctcgagcgcttctttacgggaagacagaaagtaatcagcaagctcatcaatggtttgatattcaaaaaacaaagtgctgctgacagaaccgaagacgtcttttaacgcgttggtcagtctgacgaccagtatggaatccaatccgtatgcggttaaaggttcatgggataaaagacgatgcgccggcactttaagcgcttcaccgattaccttcttcatcagttcaacgcttttttctctcaagctgaaatgcaatgtatcatccgaaagaccatctgcgtcatacggacggcgctccggtttttcttctgacgcctgcgggagggcaagcctgaccgttccgtcactttcagccgctataatctgctggcctaagtcgtgtgcggcttcagccggaaacagaggatggacgaacccttcaagtgaaagcgcttccgaccagccggccggctcaacccccggacagcccggaatccgtaaatcatgatcctcatacagccaccagccttcaagaaggccgaacgtcacatggttgaatacggtgcggctgttgatctcatttataaacagctggccgtttttttgcagcattgctttcgcatggcgcagcgtagagcggatattttttgtcgcatgaagcacattggtcgcgatcactgcgtcatacgtgccgatgtccggcgcttctgttgataccggctgctcagcgttgaatattttataagtgacataaggatattccggaccgaatatgtcttctgcatgtaaaagaaatactttagaaatatctgtgaaacaatattcggcaatatgcgcttcatacggtttcaattttctcatgaccgcggcgctcgtcccgcccgttccggctccgatttctaaaatgcggattttcgcctgcgggtctttttccagacgctcccgcaaaactgcaatcaatgtgtcagcaagcttgtcattgaaaaaatcagaaatgatattattgcggtaaatgccttccacaagacggaaggaggagtcagggaacatcacttccgttgccggaagcttaccggttaaaatgtctggaagcacacgcaatgtctcttctgccaatctgacatgcgccctcatgtctttccggcgcagccaagtctcttttttccgctcccattcctcccacacctcccctagatccgttttttccggagcaagcgctaattcagtcaggaagacaaagctctctttcagccatctgctgtattgttccgttatgccggcagccgattgaaataacggcaaagtctcatcaagccttgcgcccatctcataaagggttgatacaagtattttttcaatgagggattccatctctctcatgcagctcatgacatttgatgcttttacccgctcagcttcgtcattctgcgtgatgttaaccgctaattgtccgagtgcggaaggaatcttttccggataaaccgttacttgttctttcagatcatctttcataaaaaccggatctgtcgttttgatcagcgccagctggtcataaggtcccgaaagcagggtttccagcgttttcatcgcttcgggcgcctcaatagaagcgattccgtcccgctccatccgtttccggtattgttctgaagcgacaacgccgacacttccccaaaagccccaattgacaacctttacggcatacggcgctttttgtgagatccgcttagcaaaagcgtctttaaacgtgcacccggcggcataattgctctgtcccggcgctttttgaaacgacatcatcgaagagaaaaacagcaagaaatccagcggttccccttcagctacccgggcaatctgcaagctgacatcagtttttgcagaaagtgaagcgcggaactggtcctcttccatattggcaaaactccggtctgataacacgatggcggaatgaatgattccgcgcacctttccatgttccttcacaatggtgtcatacgcccgcttgagagaatcataatccgcagcatccgcgctgaaatattgcggtgcgggacctaaagccgcaagtcttttcagctttctttcaatctgtgtatcttttttccgtctcccgatccagacaattttcgcctgataggtctgaatcatatattcagtccatacttctcctattccgcctgctccgccgataatcacataaaccccgccgtgccggtataatgaaggctcacctgcatgaggctggcagacggccaattgctggcggtgccactgacctgcacgaaagacccacggatttccctcggggtccgccggtaaagagaagatatcgggaagatgccggtctcccctttgagattccaaatcaagaagccggatgctccaattgctgtattcttttgcgagcgcccccgctaatccgtgtatgcttgcatgactcggattgacctcatcatgttcatgaatcggctgtgcttgaaacgtgcagattgtcaatgatagttgttccgtgtcaaaattcagaagcagaagcgattttaccagccggaaaagctgcatgaccccgtgctcctgtccgtcggccgtatccgcatcataaacggatggaatcggatgatccggcgccgcccatatcatgtgttgaaaagagccttgcgctttcagtgtttcagctatttgttccgcgctgtccaaagaagtgatgtccggaaaacggacatcggaatacatctctttcaaagcctgctgaaaatccggcccgcccccgatgacgattattttttcttcacgcatgaaagacatgccggtttccggaatggtgacggtgttccaaaccggtgtcataagcaattccgtttcacggcttttcttcggcatgacgccggctttttggttaaacccggcgctttcctgcacctcttttatgataaaatctttcactgccgccagcagcacaccgcgctcatcacaaatatgcagatcaaattggtgaacggaggccgcttttacctccgcatgcacaaatacggttttcgctaacggtttaagcagctgtatttctccgaaggaaaacggtacgataagcgcaggctctttttgaaattgcagcacatgcgccattgcagtttgaacagcgccatccagtaaggacggatgcaggatgtactgtttaaaatccgcttccaagtgtgacgggagcgttaatttggccagtgctttcctttctgtataagagaattcgcggatgacctgaaaactgtccttttgcacgattcccgcctcagagaacgagtgatagatgtctttcggctccgttctctgcgtaaatggcgccggaagctgaaagaccggggcctcaaacgacgctccattttctttacaaatcacttctccttgcgaaaagagagtgccgtccgctcctttttccttaatgacatagcttatacgctctttttccgcttcaaactctatcatgacggatcttgggtctgtccctgtcacaatcggctccatataccacacattttgaagagagacgaccgggcgttctccccacaatgccgcgccgtatgccgccatttcaagatgacagactccggggagcacatatttttcgttcactaaatgatctttaaagaaatattcatccttggaaaatatcttttgaaacgtccctttccgggcggatgaaacattctcatcaagcagcggatgcagcgcttcacgccttttgacagattggggctttttcgtataccgctttttttggtcggtcagccaggacgtttcctttaaaaacggatacgtaggaagcggaactttctgatacggcgtctccggctttttgaaaccttgaaggcctttgacccacagcgcggcaaatttttcaggatctgaaacggattggcctgaaacgtccggccgtccgggtgacgcttttccgaagtaaatatgcctgccgccgctgtgcccgctcacaaagccgtccaatcgctgtttcagctcgggaagggatgacgcaatgacagcaagccggaaggagaaaggctctctgcctgacaatagggtggcagcgatattttccaggctgtatccgccggcagaaggcgagttttccaatcgggcaagaaaggagctcaattttccggcatattctttcagctgctgttcggaatgtgcgcttagtacgacggcatgcggtttttgctcagtattcccgtccgcttgccgttttggctgataagcacctacgatcagatgggcattagagcctcctgcgccgaatgaactgattgcggcgattctcggtttatctccttcagccggccacggccgattgtttcggacgacataaaatggcgaatcagaaaaagaaatcttgcggttcagttcctcggcgtgcagactggcgggaagcgtttcatgtttcatgcttaaaagcaccttgattaaaccggcgatccctgcagccgcttccaaatgtccgatattggatttcaccgagccgattccgcagtcatttttctcatcggtctgtttctcaaatgccatagacagaccgcgtatctcaatcggatcgccgagtgccgtgccggtaccgtgagcttcaatgtagctgatatccgccggacttaccgcggctctgtttatagcggataaaatcaggtcccggtgcgcttccggattcggcaccgtatacccggtcgttttgccgccgtgattagtggcggaccccttaatgacaccgtagatgtggtcgttgtccgcaatcgcttttttcaatggttttaacaaaacggctcccgcgccttcaccgggcacgtaaccgtctccgccttcaccgaagctgcggcattttccttcagaagacagaaaatgcgattggcttaaaaacatgtatttttgcggatgtaagctgaggttgacgcctccggcaagcgccatttcacagtcgcccgacataatggcctgacaagcctgatggacggcgacaagcgatgaagaacacgccgtatcaacagcgatgctcggcccatggagatcaagaaaataagaaacccggttcggaatgccccaatataaggagccggggcctttatactgatctttgaggaaaccttcttcgtgtgcaattaatgaatattcattccaggtcactccggcgaatacaccgatttgatccgtcggcctcgccgccgggttcccgtaaccggcatcctccatcgcttcccagcagcacgtgacatacaatttttgctgagggtccattaaatcagcttcccacggggaaacagaaaaaaacagcgggtcaaatcgatccggacgatcaataaaacctccccatttactgtatgacgcgtattttgccgttttctcttccgagtaataagagctgtcccatctgtcctcagggatttcggagacacaatctttattttccattaaattgtcccaaaaatcatgctggttttccgctttcggaaacatcccgctcattccgataaccgcaatatcagaactcctgtccgttcccggttcaggcaccttttcagccgcctgtacaggaagcacttcttcttcctgccggcttcccgtatcaggctccgtttctttgaattcaagaacgctttcgggatttcgtttctgcgcacttaaaaactcactcaatttctcaatgttcggatattcaaacagcagcgtttcagaaaggccggtaaattctttatgcaatatggtcatgatttcttcactgatgagagacgtcacgccaagagtaaaaaaagcggttttatcttctgcttcggtcacctcggcacccagcttttccgctattaccgttcttaaaaattcgttaatacatttcatgaggataccatcccttgtacaaaagaatttttctgtgctttaacaagttaatccgccgtctattgccattgtctgtccggtcataaaggacgattcaggagaaagcagaaaacgaacgagtccggtcatatcgtctgtttcgcctaaacgccccatcggcgtccttctgataatctgcgatttttgtttttccggcatatttttcgtcatatcggtgtccacaaaaccgggcgcaagtgaattgacacggattcctttggacccgagctccctggccaggcttcgcgtcaagccgtcaagagccgctttggatgcgctgtagactgaagtgcctttaaatcctcttgaaccgataatggagcttatgttaacgattgatccggaattttgtttcagcatgacccgggaaacgtttcgggtcagcttgatgactgaaccgatattcagattgaggatgcggtcaatgtcttcatcattggtcaggggcagcagctgatcaaggttcaaaccggcgttattgaccaagccgtctattctggaaaacttgcggtacacttgaagaacaaactgtttcatggcggcatcatccgccgcatccgccgcttcccaataaaagcggtcacggtacttttcactctctctcaatgtgttaataaaatcagattcactgcggctgaaagcggctactttgtaattctcatccaaaagcgcctgtacaatcgcttttccgagcccccggctacctccgctgacgaccgctacttttccgttattcatatttgcctcctgttttatacgtttcttatttttttaaatcggtcattagacagtttccgatctgtaacagagatgatctgcggtatctgatatggctgcagcttctgtctgcaatgagctacggcccgctttctgaaagatttgatatcttcctctttttcaagtacggcctctgccgcgacaatctcgcctgtaatcggattttttcggcccgttatgagaacatcccggacattaggtatctccagaaagacgctttccacctctgccggaaacactttctctccgcccacattaatgatttcactctttcttccgagaattcttatatattcgccgtctgtttccacctggtcaccggtgtcgtaccagccgtcttcatcgaaaggtgagggtgcgtttaaatagccgagcatcgccgactcagaacggacccaaagcgtgcctccggtaattttggtctctgttccggcaccgcctactttcatccaagtggattggctgtcttttgatttcgttgagaatatacccagttcagttaatccgtatgtttgtttcagccgtacatccggaaacagccggtgaatgccgcgcagcgttgattggggcatcggttctgtgccgtaagtgatcagctggagtgaagacaggttatagccggcatccgccttggacatcagcagcatgtttaaaaaagtaggggtggcggggagcacttggacagcatatttgtcgaccgcctgataaacggactccggcgttctgctgtctgatgtgacgatcgttcccccgttaaacagaatcgcaaacagcgtattaatgccgcctatatgatccaatttcagaaaaatgagcgtacgcagcggttttctcttcgccgttttgtatttttcaagcagccggccggcgcttaacacggatgctttgcttttgccggaggttcccgatgtgaaaataataatgcctgactcccctttctcgcgcaggtcatcaagcagagggtgagaggcgctttcagaaccttcacgaagcgtccagctgtcattttcatttatttcaatgatttgattcactttcgcgtcttcaaacatatcgagatgcttttcccttgattcattgctgagagggacaacgatatttcggtttaacaaaagcgccatcagcaaaaaaatggcgttcggggaataatccccgataagcgccacacattctccttcacgtattccgttttgttcaagttctttctgaaaaaagctgattcgtgtcagcaaatcatcatacgtaaaagtctgccctttaaaaatgagaaactcactgtcctgcgtttccctaagcttatcagtcacccagctgatatctcccctgctttctgttttcatgattgagcactgtccatgtatttttgataaatatcacaaatgctgccgacggttgtaatgctggaaatcgtttctccttgggaaaaaggatccactccggtttccatctccatctgtgcgactaattgagcgatatccagtgatgagaagcccagatcctctatgactctcacatcatctcccgcttcgacggcccgatatgactgctgttcttgaatatcctgaataatttgagcgatgatctgcttcatttccttggtttgttccatttgctttcagctccattcttcattttataaacttctgatgacccgtttataatccggaatatgatcttgtgaagaggtcggcaccgccagcagcttatccaccttggaaatggccagcaatgtatgattccttttcatatagacttcaatctgatagctgattttcgccactgagatcataccgagggactcaccgtgaaagtcgggatcgcattcttcaatgtgtcccgtcatataaatatcaagctcttcatctgcaaaacaatttccgtaataatacgtctctctttcaagcaaaaataaatgccgcgcgattgaaaccggaaaacccggcttcgaccggcgcgtcatccattcaaattccgccgcatccattatcttgctgaatttcgcaaacaccatggcatgccccggcgcagcatcctgatcaacaggaacccgatatgaaacggggtccgctgttttgaggtttcccggcttcataccgaaagcgtccgttctgactttctttgaccgcatcagcgcgtaaggcggcttggctagcttagaaagttccgcaatacattcagccttcggcgctgagactttgcgcgtcgaaccttctgtttgtgtgacgtcaacgacaattaaactattggctttcatagaaggaaaccgtccccggtcccactcgcttttatcagagctgaccgctcctttcggcccgaacaaataatcagattctaatatggtttctccaaaccgggagatatcgactccgacggaaacctcgtcccataatcggtactgatcaagaggcttatctgaaggaactttgagatgtgtcataaaataagccggatacaaaatcagcccttggtgatcggccatctgatcaggccggaatcccgttccgtccgttaaatggtgactgtgtgcattgccgaataacagcagcagcgcgtactcattcaaattccctaatccgacatggctcatcgttaattcatgattttcaatcagcatggtagtcctccgcagaaaaaatgtaatgtctggtcatactcagcctgtaatcgataccagcctttgcgcaagaaggccggctgtttcttccatgagctgtttgccgatcaagtcgacatgcctgtttctccaattttcaagaggggttcctttcacccattgattaaacgcgccgagcgcagggccgcaatgaatttggtaatctattttactttcgctttttccttccagagcgagcctcgtcgtatgggaaaaataccatttaaataccatcgccattttgtgtttcggattctgttcggctttggcgatctgttcaggagatttatcacgtttcaactgctcatacacttcctcaaaactgcgctggaaatacttatcttcaattaatgttttcgttttttcatctatttcatctaaagaattgtattgtctgtacaagtcaaagagtttattggctcttgccgggaaaaacaggccttttttcagcacctgcacccttgctcccgcttcaaacatatctcccgcgggagcgtatgacgtatcctgcacgttcgcttcctgaagcagatctttcactgaatcacttgtcccggcttcgaccgtgcattgattaatagaaccggttccgataaattcggcgccgagcagaaacgcggcagcagccgcttccggagtgccgatgccgcccgctgcgccgattcttacttttttcgcataaccgtgcttctccatcatgcggtctctgagtctgatcatggcaggcattaatgtatacggaatcccttggtcggtatgccctcctgaatccgcttcaacgcaaatgtcatcagccatcggaatttcttttgcaagcgccgcttccccggctgtcagccgattgtcagacacaagtctttccagcacatgagccggagccggattcagaaaggcctcagcgacttcaggccgggatactttcgcgatgattctgttttggactgacaccgatccgtcatgattcctgcttaatccctttgccctgtatatcacgagagccggggttatgcccataaatgccgatgcttcaataaggtgaatgccgttttttaaatataaatctatcattctgacttccttgtcaggtgacatcatatgatgaagaagattcattccgaatgtttccccttgccgcagtgcagaccggatggttccgatggcctgtccgatccgttcgatactcaatccgcccgttccgaaaaagcccagcattcccgcttttgccgctttaatgaccatctgttccgaagcaattcccctgtacatggagcccgtcatgtaagcatattggatgttataatcttttttaaaatcttcgttccctaatctcattcccgccgttttttgggaatcagctgccgatgctttaacatcagcagtatcagactcttctttcggcataggtaatgggacggcatcttttttaatctgcctcgtcagttttgtcagcacttccccgggcccgacttctgcaatttcattattttcaagtcctatcagacggcgtatcgtgtccgtccactttacctgattggtcatttgcaaagtcagatttgttttgatttcatcattcttataaggtgcggcatgaagatttgagatcaccggaaaacgaagaggcaaaaacgccgtttcttctaaataatccgcgaactctttttcagcatctttcatatagcgggaatggaaggcgccgctcacatttaaaggaagatacattctcacgccggctttttcaaaggcggggcccgctttttgaatgtcttgtttcgttccggcgatcacaatttgcgaaggtgaattgtggttagcgatatcaatgccggtcagatgataatcggatagaacctcttttacttgttcagccgtaaaccccaaaaccgccgccatgcctccgggagctgccttgctcatgagctcccctctttttttcacaagctgcaaaccggtcttaaaatcaaagcagccggccgcaaataacgcattatattctcctaaactgtgccctgcggcgtaatcgggctctctgccggactctttaatcttctttaaataactgagtgcacttaccgtatataacgccggctgggtaaattgcgttttccccagctgatgattcggatcctccaggcacaattcttctatagagtagcctaatatgtcatcagcctgacgtgtcagatcttgaaattcatcaaacagcccggctcccattcctttaaattgagaaccctgccccgggaacacaaacgtaagcatcttatcctcatcctttccccatcgccaattttgtacatcacatgtggttctccatacaaaaacgtctcttatttcatatattgactggtgtaaacaccgccataaaaataaaaacacaaacgcgtttgcgattcagcacaggtttaaaaatcgcaaacgcattgtgttttccttttctaacataatttatattaaaacatcttgcttgtttactgaatgtttcgcatgacaagctgcagtgccaatatgcccgaaaacagccatgacggcacacttctcccttatcatgtatatgtagatatatacactgcaatcatttttataatccctatttcctcttcaacgtgccgaaacagcgattgaaatttaataggtgctttactttaatttaataaatttaacaaatagttgctatttaaagagaataatatcaatttatagataataatgtcaaggctttatttcgttattttctgacatttattccacagttttatattcggtggacagtcggcataattgtttcgggataaatgtcagataattccctgaacccttttcatgtcaaagaaaattcatcgcctctctgtcaattgggtctatacttatttttcattttcatatattatgtaaaaaaaagacgaattagaaaaatttttaatcactttaaatactatccattaaatactttctttgtataataatttcttattattctaaggaggatccagtcatgaaatggtacgcactttttgtagagtcgggaaaagaagaagcagttcaaaaatttctgcgtctgcagtttgatgagcaggctctctactcaatcatacccaagaaaaaagtcacagaacgaaaagccggaattaaatacgaggcactcaaaaagatgtttccgggatatgttctgtttaaaacaaagatgacagagcggacatttcataaaatcaaagaactccccatttcatgcagaatcgtgaataacggagcatattattccaaagagcgcaaaacctatttcacgacaattaaggatgaagaaatcctccctattatcaggctgatcggagaaggagacactgtagattattcaaaagtctatattgaaaattcaaaagtaaccgttgcctcagggcctcttaaaggaatggaaggcattattaaaaaaatcgataaaagaaaaagacgcgccaaaatctgcctgtcttttatggggctggacaaaatggtcaacgtcggaattgaagtgctctccaaaccctagcatttcaaaaaaagcatcaacagcatgtgccgttgatgccctttttatataaacagacgaaagcccgacatcaaaataaccccgctcaccaccgtcacggtcaaatttttgttttcaaggcatagttgacctgaagccgggctgcgcctatgagacaaaatcacatttaggggaatcattttaatcaagagcggtgaattgacggttgagcttcatgacgaaaagcatgtgctgacttcgggcgatgccgcacagttattttcattcctcggaaccgatgacatatttattgctggtctattatcctgaaccggcttaaacgcatatcaggcttcttcaggcagaagcctgatggaccgcaacccattcttgtatgcattgaatcagtttctggacagaaggtgtctgcgtctcctttgcacgagctgtcaaaatgccgagctgcctggagacataccggtcgaaccgtttgatgagcacatcaccatcattcaccaaaagctgcggcaagatgctgatccccagattattccgcaccattgcaataatcgcttcatcccctctgatttgataagcaacccgcggagtgatcttttcttcctttaacactttcagcacatcaaaatgtgtctccggataaggcacgatacatttgacggactccatgacatgtaacggaaccgtttcatattgcgccaattcatgctgcgggctcatcaccgctacaatcgggtcctcggccaacgggtaaaaatgccacttctcgctgtgggatgtcccaatcgccgcatcaatccggtcatctttcagccattgttccagctcagtagaatttccatcaaataaatgcaccttaatagaaggatacagctcattaaattccctcaaaattttcggcagccattttaccgccacgctcgtaacagtgccgagccggacttcccctctttctaacccattaatattatcaacggtttgagacagtttttcatagtttttttgaatttccttcataatatgtaacactttcaagccatttgcggtgggcctcactccatgccgctgtctgatcaaaagcggaaaaccgtactcttcctctaatttactgatcatttggctgatgttcggctgtgtgtaattcaatatggcagcggcttgggtcaggctgccgctttctaccgttttaataaaggctaaatgcttctttaaatccaatcggcttcatctcccagatatcattctttattatccaatgcattagttatatttagtttacttatacatcaatcaaaaataaaatggcaatgtctccatcattatacttgataacaaacagaaggtgagcgtttcagcatgagttttctcattcaattttttatcggcggcaccgttatggtggccgccgcgtatttaagcaagtcgaaatacttatttttatcaggcgttatcacattgctgccgatcatgtcgttactgaatattcacttgcagctgaaaaatatgagccccgacgatttcagagccgctcaaaaaaacggaatattcggtgccttcggcgcagtgatcttcatcagcagtattttcatcctgacaaactggatcaaaggaggccacgcagtcatcggtgcgtttctcatctatatttgctatatgatcggctgtaaatgcctgttatgaagatacggccacgctgtgtataaaaaaatgcccgtccagaacaataagaacgatctgttcagttgtgagcagtttatatgactgaatgatcatgagttgttataatcaatgtcgaaaaacattccgggaggcgaaataaatggcgagaaaattattcacaccatggaccgttaaagatgtaacgatcaaaaaccgtattgttatggcaccgatgtgtatgtattcctcacatgagaaggacggaaaactgcagccttttcatatggcgcactacatatcgcgtgcaatcggacaggtcggcctgattatcgtggaagcgacagccgttaatcctcaggggcgcatttccgatcaggatttgggcatctggagcgatgatcatatcgaaggttttgccaaactgacggaacaagtgaaagcgcaaggatctaaaatcggcattcagcttgcgcacgccggacgtaaagctgagcttgagggagacatttacgctccgtcagccattccgttcgatgagcagtccaaaacaccggctgaaatgacgacagaacaaattaaagaaaccattcaggaattcaaacaggcagcggcgcgcgcgaaagaagccggctttgacatcattgaacttcatgccgcacacggctacttaatgcacgaatttttgtcccctctgtccaatcaccgtacagacgaatacggaggctcacatgaaaatcgctaccgcttcttaggcgagaccattgaagccgtcaaggaagtctgggacggcccgttatttgtccgtatttctgcatcggattatacagacaaagggctggacattgcggatcatatcggttttgcgaagtggatgaaagaacagggagtcgacctcattgattgcagctcaggcgcactcgttcaagctgatattaacgtcttccccggctaccaagtgagcttcgcggagaaaatccgtgaacaggccgaaattgcaacaggcgccgtcggtttgataacgacgggaacaatggccgaagaaattctgcacaacaaccgcgctgaccttatttttgtcgcgagagaacttctccgcgatccgcactttgcaaggagtgcagcgaagcagctgaatactgaaataccgtcaccggtccaatacgacagagcatggtgatgaagtgacagccggagtttttcgatcccggctgtctctttttttatttttcgagaaacgattgccgaagcttctccgtcttccctatagaaccaattagaggagatgactccaatgaaagcagcatggatggaaaggacatatctgattgacgggtgtccgttttatacgaaacaccgtaaaggcgccggcgaagtgacgatcgtctttgaagccggctacggcacttcttctgaaacatggacatcattactcgctgacatagatgaagaatttggggttttcacatatgacagagccggaatcggcaaaagcggacgaagccgaaacaagagaacggcggaccatatggtacaggaattaagcgctcttcttctgaaggccggcgtcaagcctccttaccttgtcgtctcgcattcatacggcacgattatcagcagactttgggcgagccggaaccgccgggatattctcgggatggtgctgcttgatccggtttctgaggatcaggagacgaaagtgcttccgcttcttcctgaagaaatgaaggccgcctatttgaaacagttcaaattggaaggatcacacgcagaatttttaacgagccttaggcagatccagcatcagcagattcatttcggcgatatgccgctgttgattttatcatcgggagagcgggatgagcgcttaaagcacgctcatgaacaatgggtgaaactgcacagaagcatgcttgatgtctcttatcaaagcggatggattcaggccaaaaacagttctcatgccattcatcacgatgaaccgcacatcgtccaccttgccatttatgatgtttggtgcgcggtgcgccagcaaatgaatgctcctgcctatcaggcggtaaactgatgaaaacaaaagccattgtgcaacggcacaatggcttttgttatcgtgatctatttggtctcacgatgcaaagtatactttttcaaccggggtgaatactttttcatttctaaccggtccggattcgtccgtttgttcttcgtcgtgatataatttctgtcccctgtctctgtacaggccaatgtaacattcacacgcatcattttcaccccttttttaaatcgtaattattacgttttattatatatcatcagaaaaaaatgtcaagcgtctattttttaagaccgctccacagtgacctccatgaagtcaaatgcgatcttactgttttcaaataccgctttcgcctcatgttcgagacgctctatcggcgattcaccctgataccttgcgctgatatgagttaagatcagctgtttggcgcctgctttttttgccgtttgcgcagcctgttctgtcgtcgcgtgataataattatgtgcgagctttgcatcttccttggcaaacgtcgcttcatgaacaagcacatccgcattgcgcgcaagctccgttacccgctctgatgccctcgtatccccggaaaaagcgacgattctcccttttttcggggattccagaaaatcccgcccattaatgattctgccatcgtcaagtgtgaccgtttcgccttttttgagtttctgatagacgggtccgggcgggatattcatttctttcaatctgccggcctgcaatgcgccgggaatatccttttcctgaacccggtagccgaacgcttccacaccgtgaatgacggatgctgcggtaacaatgaagtgctcatcttcaaaaaccgtcccctcttcgatttcatgtacggtaagaggatacgtcagatgagtcgccgtcacgttcaggcttgtttcgataaaggctttaatgccttttggcccgtaaatcgtcagctcttcttcaccgccctgaaatgaacggctccccaacagacccggaagaccgtaaacatggtcgccgtgaaggtgggtgatgaaaatcttttctattttcctcggtttgattgttgtatgtaatatctgatgctgagtggcttctccgcaatcaaacagccatacggaacgcctttcttcaagaagcttcagcgcgacggacgttacgtttctcgtctttgccggcatgccggcccccgtccctaaaaataataattccacaatgcttcctcctagatctttgtactactaaggatacaggatcagactgaaaatgtgaattcacccgggccttctccggcctgattaatttttttccgcaaaccgcaaaaaacaggctgaaatgtttgctttcaatgaattttagatttaaaatgaaggaaatatgcggggttttaaaccatgcttcagataaagtgaggtactctaagtgaaaacaaacgacaaaccaaaagcagtaattgtaatatttggtgccacaggggatttggcaaaacgaaaactttacccatccattcaccgtttatataaaaatggtcaaattggtgaagagtttgcagttgtaggtgttggaagaagaccttggtcaaacgaggacctccgggaaacggttaaaacgtctgtttcttctgccgggcaaaaagacatagacgatttcacatctcatttttattaccatccgtttgatgtaacgaatccgggttcctatcaggagctgaatgtcctgcttgatcagcttgaacatacatatgaaatcccgaacaacagaatgttttacttggcgatggctcctgagtttttcggcacgatcgcaaaatcacttaaaaacgaaggtgtcacagcgacaaatggctggtcccgtctcgtcattgaaaaaccgttcggccatgacctgccgagtgcgaaagagcttaacaaagaaatacgcgaagctttcacggaagatcaaatttaccggatcgaccattatttaggcaaacaaatggttcaaaatatcgaagtcatccggtttgcgaatgcgctgtttgagccgctgtggaataaccgctacatctcaaacatccagattacgtcaagcgaggatctcggcgttgaagaccgcgcgagatattatgaaaaatcaggcgcactccgtgatatggtccaaaaccatattttgcaaatggtcgctctcttggcgatggaaccgccgattaaactgaacacggaagaaatccgcagcgaaaaagtgaaggtgctgagagctctccgccctgtcgctccaaacgaagtgagtgactacttcgtccgcggacaataccaagcgggaacgattgacggaaactctgtaccaagctatacagatgagcataatgtagcaccggattccaatacggaaacattcgtgtccggaaagctgttaatcgataacttccgctgggccggcgttccgttttatatccgaacagggaaacggatgaaagaaaaatcaacgaaaatcgtcgttcaatttaaagacattccgatgaacctttattacggcaatgaaacgaatgtaaatccgaacctgcttgtcatccatattcagccggatgaaggcatcacactatatctgaacgctaaaaaattaggcggagccgctcatgctcagccgattaagctggactactgcagcaactgcagtgatgaaatgaacacaccggaagcctatgaaaaattaatccatgactgtctgctcggtgatgcgacaaactttgcccattgggacgaagtggcgctttcctggaatttcgtcgatgcgatttccgaaacgtgggcagccgacaaaaccctttctccgaattatgaagcagggtcaatgggaccgaaagcttcggacgatcttcttgaaaaagacggtctccactggtggaatatataagaaaaaatttaaaaaccgcggcgccgttcatgacggcccgcggtttttaatatcagaaaagcccccgcaatcaatgcgggggcttcttcattacttcatccattcagtatggaaaatgccttctttatctgtgcgttcatacgtatgcgcgccgaagtaatcacgctgcgcttgaatcaagtttgcaggaagcactgccgtacggtagctgtcgtaatacgcaagtgcgcttgagaacgaaggtaccggcacgccttgggctacggcaagtgaaatcacttggcgaagagcgccttggtagctttctgcaatgtttttgaagtagctgtctaacagcaggttgtcaagctccggttcacggtcatatgcgtctttgatcttttgcaggaacgccgcgcggatgatacagccgccgcggaagatcatcgcgatttcaccgtatttcagatcccagttatattcttcagacgcggctttcatttgagcgaagccttgtgcgtaagaacagattttactcatgaagagcgcttttctgaccgcttcaatcagctcttctttattttcagtgaccggcttaacgtctggtccggacagaaggccgcttgctttcacacgctcttctttcattgcggaaatgaaacgcgcaaaaacagattcagtgataatcggaagcggcacgcctaagtcaagagcgctttggcttgtccatttacccgttcctttttggcctgctttatcaaggatgacgtcaactagcggtttgcccgtttcttcatcttttttagtgaaaatatcagccgtgatttcgatcagatagctgtcaagctctcctttgttccactcagcgaatacttcgtgaagctcttcggcagacaatccgagcacctgtttcaaaatgaaatatgactcagagatcagctgcatatcaccgtattcgataccgttgtgcaccattttcacatagtgtcccgctccgtccgggccgatgtatgtcgtacaagcttccccgtccactttagcagaaatggcttctaaaatcggttttacgagttcgtgcgcttccttttggccgcccggcataatagaaggccctttcagcgctccctcttcaccgcctgatacacccgttccgataaagtgaatgccgctttcggcaagctctttgttccggcgctgtgtatctttatagtatgtatttccgccgtcaatcaaaatatcgtctttttccagatgaggaagaagagattgaatcgtcgcatccgttgcagttcccgctttaaccattaataaaattttacggggtgtttcaagagactggacaaactcctcaatgctgtatgtaccgacaacatttttaccttttgcctcttctaaaaactcttccgttttgctgcttgatctgttgtatacagacacagaaaatccccggctttcgatgttaagagccagatttttacccattaccgcaagaccgataactccgatttgttgttttgacatattctaacgtcccttcttcaaacgtttaaccattttaaaatttaaattaaaataaaatgatatttatactaaagaaattatcatacataaccccttttttcaagttattcaccttttcttttcatcctgaaaaaagtctctgttaaagctcgtgccccttgttttgctttcttctttttttataacggcgccttttctgatcaggttttggccgtacttttcattcagctcgttcatcatctgaaaaatcggctcatcctttgcgtcctccttgaatgaaaacagatcaagctgtttatacgcctgctgtttttcaaccagttccgtcccggtgatgccgagaagccttaccgggttttggttccagtgcttgtcaaacagttccatcgccgcttccatgatgtcttttttctgatcagccggattgctgagggtcatgcttcttgtgaccgttttccaatccgcataccgaatcatgatgaacagccggcaggccatgacctccttacgctggagccgttcgctcacagacagcgcaagccggtcaaacacgcccgttaattcatcccagtcagccgaatcatgcgacagggtggatgagttgccgacgcttttaaattcataaatccgctcgggattgacttctgcaggatggatgccgttcgctttatccttcagcctcgggccgtttatgccgagaagcgttttcagcgcatgttcatctccttttgccaaatcaccgatcgttttgatgccgagcgtttttattttttccgcagttttcgttcctataccgtgcatctcttctatcggaagaggccataagacgtccggcagctctctttttcttaaaatggtgatgccgagcggttttttcatgtcagacgccattttagcgagaaatttattcggggcgatgccgatgcttgacgggagcaaaagctctttttgcagtctcgcctgaatgtctgcggctgtctcatacgccctgtgtctgtgcggtgtgtccgtaatatccatgtatccttcatcaatagaaacaggctcgactaaatccgtatactccctcagaatgctgaacatttcttttgacgaactccgatagcggtcaaaattcggaggcacgacgatgagttccggacagaggcgttttgcccgccacaccggcatggtggtctttacgccccgcgctctcgcttcgtagctgcaggtgacgatgattcctttccgttccttcacgtttccggcaacggcgataggttttcctcttaaagacggatcatacgccatttctacggaggcataaaaactgttcatatcgatatgaaatataattctcccttttccggccactcccggcgcctcctttcctttcatagacaaccttatatatatgtagtaaaataagagctgaatggatgtgataaaatgattcttgagtcaatgaatgactttttatttttagtcgattttttcacaattattcttcccgctctgaccgcgatcggcatcgcttttcttttgcgtgagcgccgcgcaggcgagcattggagaacgaaacgaatagatgaacatcaagcagtcgttcagctgaaccgaacagactttcttattattatatatcatcgcattacaacttggatacgtaaagtcatccgcatgaattcaccggcgaatgatgatgaagatgtcagcttcctccttttataacggcaagtgaagatataaaggaggaaacataattgtctaaaacatatcaaaagtggatcgtattgggattattttttatcgtactgtgcacaggccgctcggcttttgcggcgacatctcagactcagacgggaggcctcgggaatatcggttttttccacgattacctgatcgagccgttttcggcacttttaaaaggggtggcgggcctgttccacggtgagtacggactgtcgattattctggtgacgattatcgtccggatcgttgtattgcctttgtttgtgaaccaatttaagaaacagcgggtgttccaggaaaaaatggctgtgatcaaaccgcaggtcgacagcattcaggctaaaatgaaacaaacgaaagatgcggaaaaacaaaaagaactgcaaatggaaatgatgaagctttaccgtgagcacaatctgaatccgatggcaatgggatgtcttccgatgctggtgcaattcccgattttgatcggtttttattacgccatccgctcaacgccggaaattgcttcacactcatttctgtggttcagcttagggcattctgatattcttgtatcactgtgcgcgggggccatgtatttcttacaggcttatatttcccaaaaattaaacgagaaatattcaccggctgctcaaaatccggccgcgatgcagtcagcaaaaatcatggtctttattttccctgtcatgatgaccgttttttcgcttaacgtaccggctgcgctgccgctttactggtttacaagcggactgtttttgacagtgcagaacgtacttttacagcagacgcatcataaaaagaaacaggctgcggctcaggcggagcccgccaaatcataatactgaaaccctgccggaacctatccggcagggttttttcttgtatctgcaaagctttaagcctaatatcatgaagaatgaaaaaagcacccaatcaactgggtgcttcgtttttagttggccgctgtttcgataatggcaacgaccatttctgccgttttgacgagctcttcaatcggcattttttcatttttcgtatggatttgttcatagcctactgacaggttgactgtcggaatgccgtggccggcaatgacgtttgcgtcacttccgccgccgcttgtctgaagttcgctcggacggccgatttttgccgccgcttttttcgcgacttccacaacctgatcgccgtcctgatatttgaaacccggatacatgaccgcgatgtccacttccgcgcggcctcccatctcagctgcagcagattcgaaagcttctttcattttctgcacttgcgcttccattttttcaggcactaatgaacgcgcttcagccagaatatcaacctggtcgcagacgatattggtttgcgtgccgccttcgaaacggccgatattagccgttgtttctttatcaatacggccgagcggcattttagagattgcttttgatgcgattgtaatcgcggagatgcctttttccggttctacacccgcatgagccgttttcccgaaaatggttgctctcactttcgcttgtgtcggcgcggctacaataatgttgccgacttttccgtctgaatcaagcgcaaaaccgtatttcgcggtaatgtctgaacgatccattgcttttgccccgactaatcccgattcttctccggccgtgataatgaattcaatggtgccgtgctcgatgttttgttctttcagcactttaatggcttcaaacattgcggcaaggcccgtcttatcatcagcgccgagaatcgtcgtgccgtcggattttacatagccgtcttccacaatcggcttaacgcctttgcccggaacaaccgtgtccatgtgggatgtaaaataaatcgtatccgcatcttttgtgccctttaacgtacagattaagttgccggctccatgccccgtcacttcttttgtatcatcttcttttacgctcaatcctaaatcagtgaatttttgtttgagcaccttgctgatttccgcttcatgttttgtctctgaatcaatttgaacgagttcaagaaattcttcaagcagacgtttttcgtttaccattttcagttccctccgtttaaagcggtatattaccgtgcttttttttcggtctttcctcttccttatgcgcaagcatgtcaaatgcctgaatcaattttttcctcgagtcttccggccggatgatatcatccaccataccgcaggcagccgctttatacggaccggcgttttccttttcgtatatggcttttttttcgcgcttcgttttctccgggtccccagaagcctgtatgtctctgctgtataaaatcgacgccgcgccttccgctcccatcacggcgatttccgcattgggccaggcgaatacaagatctgctccgagccctttcgaattcatggcgacataagcgcctccgtaagcttttctgatgatgagcgtcactttcggcaccgccgcttcggcaaaagcatacagcaattttgctccgtgacggatgattcccgcatgttcctgctgaaggcccggaagaaatcccggaacatcagcgatcgtcaatagcggaatatgaaacgcgtcgcaaaaacggatgaatctcgacgctttgtcagcggcatcaatcgtgaggctccccgccaagtgtttcggctggtttgcgacaacaccgactgtacgccgtccgagtttcagaaaaccgacagcaatgtttttggcaaaatacggctgaatgtcaaaaaacgttccgtcatccgccagctcttttattacctgtaacacatcgtaaggtttcgaactgtccgcgggaacgagggtgtttaataacggtctggcgtcttcctttttaacgggtagtgccgtctgtccgccgtgcgggagataagaaagcagggttttcacagccgaaagtgcctctttttccgttcgtgcggaatagtgggcatttccgcttatcacattatgtattcccgcaccgcctaaactttccgcgtcaatctgttcacccgtcacctgttcaatgactttcggacctgtaataaacatgtgcgacgtatgttccgccataatcacaaaatccgtcaaagcgggtgaataaacagcaccgccggcacacggcccaagaatgacagaaatttgcggaatcactcccgagtaaaggacgttgcgcctaaagatatgaccgtatccatttaatgataccacaccctcttgaattctcgcaccacctgagtcgttcagcccgatgatcgggtttttgtttttcgccgccagatccattaccgccgcgattttttccgcatgcgtctcgccgagcgtcccgccgagtacggtaaagtcatgggcaaacaaatacacgggccgtccgtcaattgtgccgtatccggtaacaacgccgtctcccggagcattctggcacccgggcgtgcggcttttggcaaacggctgcagctctgaaaaactgtcttcgtccaatagatagtcaattctttctcttgccgtcagcttgccttttttgtgctgttttttatttttttccgctccgccgccgtttgttaaaaaggaacgtctttcgtttaagtgtctgatatgatcactcatgttcatcttgagtttctcctttttcaattgtttcacaaagctcaatcaggacgccgttcgcctcttttggagagagaaatgcgatcttcttcccgcccgctccgttttgcggttcatgatgaagcaaggtcatgcggcatgattcaagctccttgatcgtttccttcatatcggcgcagcggaatgccaaatgatgcagcccttcgcctcttttctgtaaaaaagagctgacgggagacgcgtccgacagcggctcaatcagctcaagctttgtgcctcccgcttctaaaaaagcaactctcacattttggccgtttaccagctcgtctcccatatacgtaagcccgagcatccgttcgtaaaatcctctcgcggcttcaatagagctgacggcaatgccgacatgatcaagttttttcatagcgcggccacctgctttcccccataggatatggcttgttcatataagcaaaacacgttaaaatggtagacagtaatcttaaggagtgaaacaatgtctcaaaaatttatgaaaagcgccgtcatcgtcattttgggcgtatttatactttcaaccctcctctcaggcattatgatgtatttgcagtaaaaaagcaggcgcctcattgcaagggggtttcctgcttttttatgagggctttccgctctattgcaatgtcctcgaatgagcggttttcttttgtaatcaatactttcgttccgggagggataatccggaaaatacggatgacatcccggtttttcatacggatgcagccgtttgatacaaaccccccgatcagctcttctctgtttgttccgtgaatgccgtatattctgccgtcggtgcctttcgcatcaaaaccgatccagcggacgccgagcgggttttccggcgcgcctccctctacatttttcttccggtaatacggattgacggctttgaccgttaccgtaaattctccttcaggcgtcaaatcatccgtttttcccgtcgccacctgataaatgccttctattcggttatcctttacaacagcaagcgcatttgtggctttattgacgataatataagggtcacccggcaaagggttcgcgccaagcggccaaagcggagacagcagcaggacggctgacaataaaaaaaatcgcatgggctcccctccttttttcattagaatgaccaatgaaaggaggactcatgcgattgatccatatgttttttacagcttgatgcctttgaaataacttttaatcacgagatattgttccatctcaccgaggaggtggaacaaagccgcccgcgcttcaaactcctcacgcgttgccgggagcggcatttcttcaaattccgttctcatttctgcaagtctttttaaaaatttatgagcggtattgccgggatgaatggcttcccttaattcatggatgaaatgggcgattatttttccctgctccaccgttattgaaatagaggtaatcttcggcagcagccgttcaatgatttcaaattgtttctgcctcatcttaaaataatgatagtagagattttcatggcgcaaaatatgattctgcacgtcccgataggcgaggtttttcgcctcttgaatcatctgatgcgtctccggtatttccttccctgtccaatcttgctcaccagttaacaaataccgttcgatttcggcgaagatgacggaaaagttgtcctcgatttttttcctgtacgctgcgagttttctgtcgaggctcggcatatacagattcattaacagcgcgacgccgatacctacggtgatcagctggaactcattccagataaacgccatcgtaatgccgccggacatatataaatgaagaatgattactgagctggtgacgatcccttcatttatttttaaaacgactgtagtcggaatgaacagcaccagcaatattccgatcgcaaacggataatagccgatcagtccgaaaaagacatatgaaaagacgatcgccaataaacaggcggcaaatcgggcccacgaggcctgaagcgaccgcttttgtgtaatctggatgcacaatatggtgatgattcctgcggatgcgaagttttgcagatgcaacagctgggctaaataaatggccagcgccgttccaagtgcggtctttagtgtccggtaaccgattttaaacattgcttgctccattctgtttgtttctttctcaaaaaaaagaagaagagcattcttcttcttttcttacagttatattttataatattttttctaaaaagtcctgtgctctttttgacttcggagaaagaaaaaattcttccggctgaccgtcttccacgatcgtcccttcatccataaataatacgcggtctgcgacttctttggcaaatcccatttcgtgcgttacgatcaccattgtcatgcccgtctgcgcgagctctttcatcacctcaagaacttctttgaccatttccgggtcaagagccgaggtcggttcatcaaacagcatgatgtcaggattcatggcaagcgcccgcgcgatggcgacccgctgcttctgtccgcctgacaaacggttcggatagtcgttccgtttgtcaagcagcccgactttttcaaggagagcgcacgccttttcctccgcatcctttttagactctttcttcacgctgaccggcgcgtatgtgatattttcaagcaccgttttatgaggaaacagatgaaaatgctgaaataccatgccgatattttcccgcactttcagtttattcgttttagctgcggtgatttcgttttctttaatggcaatcgttccgccgctcggggtttccagcagatttaagcagcgcagaaacgttgatttgccggaaccggaagggccgatgacggcgacgacttccccttcttcgatctgtgttgaaatgtttttcagtacttcatgtttcccgaatgattttgacaggttgtcgaccttaatcattggctttcagcttcctttctacgccttttccgatgaatgctaagatcaaaacgagcacgtaatagattaagcccgccacaataagaggttctaaatagttgtatgttgcggcgccggactggtaggcccgtctcataatatcgccgagaccgattaccgtgacgattgccgattctttcgtcaaggtgattaattcgttaataatagccggagaaatgtttttaaacgcctgcggcagcagcagatctttcatcatttttccgtacggcacgccgagagcgacggcagcctctttttgtcctttgtcaattgcgttgattcccgctctgataatttcagagacgtaagcggctgaattgagcgataatgcggtgaccgccgcccaaaattgatcgatctgaaagccgagaagctgcggcataccgaaatagatgatcatcagctgcagcacaagcggcgtgccgcggaatatcgaagtataaaaatccgcaatccatttcagcggactgatcgtgctgattttaaataagctgagcacgattcctaatacaagaccgatgaccgctgaaacgagcacaatttttaatgtgaccgcaaggccttccaatataaaaggaatttgggggattgtcgctgagaaatccaaattcatacgtgtgatctcctttgtctttattcaagataaaaagctcaacgaaaagttgagcttccttttatttctcgttggtgaaccattttttcttcagtttttcgatttctccgtttttctccatttctttcagcgctttgttaaacttcgctgtcagatcactgtctttgcggaacgcaatcgcggagcccgattcgtctgatttcgcatctgctgacgcaaagccctgcagatcgttatttgaactgaaatagccttgtgctacgatgtcttcgataatcgcggcatcaaaacgcccggatttaatctcttccgttaagtctgagatccggttgcggtcttcgagctgaaaaccgtatttcgaagcgagcttcttgcctttttcctcttgaatggagccgagctgaacaccgacggttttgcctttcagatcattcagggatttaatgctgcttccctttttcgtaacaatcatattgttagcagtataataaatatcagaaaaatcaacttgctttttccgttccggcgtaggtgtcattccagataaaatcatatctacctgcttggacttcaaggctgtaatcaggctgttgaagtccatgtcctgcacctcaacgtcatagccggtctttttgcccagagcttttgccagatcaacgtcaaacccggtgatctgatcgccgtctttatattcaaatggtttatagtcagccgatgtacccataatcagcttattctttccgccctctgagcctgaattgcctgatccgcaggcggacagcgcaaaggtgatacatgcggcagctaataccaacagccatttcttcatgattcatttcccccatatctactgatctcttaaaattgaatatttattcgttaacttgtattttaaacactttttaattgtgatgcaatactatttttgaaaaatatattttcctttctctgtttattatagtcattgtttttccgattagtgacagctgaacgccggtgtataaatatttatatttatacagattccatataaaaaaccccggaagcgctcggctccggggtttttctttcacttatacttcttcacaatattcttcaaatgcttcctgcagttttgtgacgacggccatcggctcatggccttcaatttcatggcgttccaccattttcatgattttcccgtcttttaaaatggcaaatgacggagaggacggcggatagccttcaaagtattctctcgctttggctgtcgcttctttatcctgtccggcaaataccgtcacaagctgatccgggcgtttatcgtaatgtacagaatggtatgcggcaggccgtgcaataccgcctgcgcatccgcacacagagttgaccatgacgagtgtggttccttttttcgaaagcgcttcgtccacttcctcagcggttttcagctctgtatacccggcggccgtgatttcctggcgggcttgacgcacgacatcattcataaataaattaaaatccatattcaactgggacctctcctttttgatcatcttttcttatgatagcaaggaacctcactatcggcaaatgacaccgctcatatccaaattgttttttgttccttttatgtacctgatgtaagtttatgaccttttaaaaacgggaaacttgttaaagagattgtctgaaataaaggagcagtcgtatgagccaacggaaagcagtattaatttataacggaaacgccggtcaaaaacagattgataaaacgctcggcacggtcgtccccattttggcccagtcagctgacgaacttttgattaaaccgaccaaacatcaggacgatgcccgtcagtattgtgaaaacctcgacagttcagttgaccatttatatattttaggcggagacggcactgtgcatcaatgcatcaacagcatcagcaagcttgataacaggcccgctgtcggcattttgccgggaggaacgtgcaacgatttctcacgggcgctcggcatcccgcaaaaccttcaaaaggccgctgaagcgctcgcggccggacataaacggatgattgacgtctgtaaaacggatgacggctattttctgaacttctggggcatcggattgatcaccgaagcatcgagccatatcaatgaaactgaaaaagcatggcttggtaaaatcagctacttcacgagcgccttgcggacgatgacaagtgcgaacccgtttcctgtcaaattgacaattgacggcgaggtgaaagaagacgaagccgtaatggtgcttgtcatgaacgggcattatatcgggacaaacagagttcccctgcctgatgcgagcctccgggacggcttagccgatgtgttaatctgccgcaacacaagccttgccgcgttgcgggagctgatgacgatggagcagggttcgtttgatgatttcaaaggggagctgtcctatattcaggcctccaggattgaaatcgaaaccggacgtgaaatggacgcggatacagatggcgaggtatacggaacaacgccttgtacgatcgaagtgaaaaaacatcatctcactatgcttgttcccgaggattcacaatgaaaataaaaaaactccttttgccgcccgggcaaaaggagtttttttaatagactgaagtattttcgtcaatgttttctaagatttctttgacgcgtccgaggaaacggccgcatacgagcccgtcgagcactctgtgatctaaagacaggcaaagattaaccatatcacgcactgcgatcatcccgttattcatgacaaccggacgtttgacgatagattctacctgaagaatcgccgcctgcggatggttgataatgcccatagattgaactgacccgaaagatcccgtgttattgacggtaaatgtgccgccctgcatatcttccgcggtaagttttccgtttctcacttttttcgcaaggtccgttatttctctggctatgcctttaatcgttttttcatcagcatgcttaataaccggaacaaacagcgaatcttccgtggcaacggcaatggagatgttgatgtctttcttttggacgattttgtctcccgcccacatgctgttcatctgcgggaactctttgagagcctgcgccgccgcttttacaaagaaagcgaaaaatgttaaattgaagccttctttttgtttaaatgagtcttttatgctgtttctgtacgccgtcatgttcgtgacgtcgacttccatcatcgtccaggcgtgcggaatttctgttttgcttttatgcatattggcggcgatggcttttctgacgcctgtaaccggaatttcaatatcaccggctgacagaactggcgccggcgcttgtttttgctgttgtttcggcgcttgttgcgttgtttgaacggcagccggcgccggtgcttccgacttctgctgcattcccgaatcaatgatcttttgaatgtcttttcgcgtaattcttcctcctgcgcccgttccttcaacttcttcaagctgaatgccgtgttctcccgctaatctgagcacggccggcgaataacgcgctttatttgactggtctttaccttgacggtttgcatcggtgtctgaaggggtattctgctcttcttcccgcttcggcgcctcttcggtttccgtttcttccgtttcaattttgcagatgatctcgccgactgtaagagtctggccttcttctcctacaagttctgtaatcgtaccggtaaaagaagacggcacctccgcattcactttatccgtcatgacctccgcgatggggtcatatttattcacttgatcaccgggggataccagccatttgctgatcgtcccttccgtcacgctctctccgagctgaggcatagccatttgttcaatcgccatgtcaaaaacctccttacgtctttaaaactccgctaattctctcatcgcggcttccgctttgtcaggattcatcatgaagtatttttccattgtcggcgcataaggcattgccggaacatcagggcctgcaagccgcttgatcggcgcgtctaaatcaaataagcagttttcagaaataatggcggcgacctcgctcataataccgccttctttcgtatcttctgtgatcagcaatacttttcccgttttagacgcggcttcaatgatagcctctttatctaacggataaaccgtacgcaagtctaatacgtgcgcggaaattccgtctttttcaagacgctcggcagcctgcagagcgaaatggacgcataatccgtacgtaatgacagtaatgtcgctgccttcgcgttttacatccgcctttccgatcggaaggacgtaatcatcagcagggacttctcctttaatcaggcggtacgccctcttatgttcgaaaaacagcacgggatcttcgtcacggactgcggctttcaacagcccttttgcgtcataaggagttgaaggcatgacaattttaagacccggctggttggcaaaaatggcctccacagattgggaatgatacaacgcgccgtgcacgccgcccccgtaaggcgctctgatgaccatcggacagctccaatcattgtttgaacggtagcgtattttggccgcttctgaaatgatttggttgaccgcaggcagaatgaaatcggcaaactgcatctcggcaatcgggcgcatgccgtacatcgcggcgccgattccgacacccgcaatcgctgattccgcaagcggcgtatccatcacccgctcttctccgaactgttcatagagacccgccgtggctttaaatacgccgccttttctcccgacgtcttccccgaggacaaaaacgcgcggatctctttccatttcttctttcatagctgcattaatactgtcaatataagacattacagacataagtattcctccctacttcgcataaacgtgatcaagcgttgattcaggagatgcgtatggcgctttctccgcttcgtctgtcgcttcgtttacgatagccatgatgtcatccagcatggccttttcttcttcttcacctagaagcccggcttcttgcaagtatgctttgtataaaagaagcggatcctgtttctttgcttcttctacttcttcgcgttctctgtagctgctgtcgtcgtcatcactggaatgcggcgtcaaccggtaggaaaccgtttctattaatgtaggaccttcgcctttagatgcccgttcgcgcgcttctttcacggcccggtaaacttccagcaggtcgtttccgtcaactgtgactcccggcatgccgtagcctgccgcccggtcggaaatattttcgcacgccacctgtttgtcatacggaacggaaatggcatacttattattttcacacatgaaaatgaccggcaatttatacacggcggcaaagtttgccccttcgtgaaaatctccctggttggaagaaccttctccaaaggtaacgaaagagacgatatcctttttatccatgcgtcccgcaagcgcgattccgaccgcgtggggaacctgcgtcgtcacaggggatgagcccgttacgattctgttttccttttgcccgaagtggcccggcatctgccttccgcctgagttcggatcagccgctttcgcaaaacccgacatcatcaaatccttagcagtcataccgaatgcaagcacaacccccatatctctgtagtacggaagcacatagtcggtatcgcggtttagggcataggccgcgcctacttgagccgcttcctgcccttgacatgaaataacgaacggaattttgcccgagcggtttaagagccacattctttcgtcgatttttctggctaacagcatggttctatacatttcaacggcttcttcgtcagaaagccctaatgcttgatggcggtttgtagtcattcaaacccctccttctttccttttaaaaatgaatcgcgtttccgtctgcggctaacgcagcttccccaatcgcttctgaaagcgacggatgcggatgtatggactggccgatttcccaaggcgtcgcgtcgagcaccttggcaagccccgcttcagagatcatatcggtgacgtgcgggccgatcatatgaacaccgagaatatcatctgtattccggtcggcgacgattttgacaaagccatcgctttctccgtatacaagagcctttccgattgccatgaacggaaactttccgatcttaagttcatgtccttttcgggcagcttcttcttctgtcagaccgacactcgccgcttccggatttgaataaatgcatttcggcacaagagcggcatcaagcggagccggattaagacccgccatatgctcaacggcaatgatgccttcacgggaggccacatgcgcaagctgcagaccgccgacgacatcaccgatcgcataaatatgcgattccttcgtctgtccggcttcatttactatgatagaaccgttttccgctgcaatgtccgtgttttcaagaccgatcccttcaatgttcggctggcggccgatggaaacaagcatttgttcggcgtgatacgtttctttttttccattcttttcagcggcaattgaaacgccatccgctttttccaatgtatccggaagcactttcgcacccgttacaatcttaattccttttttcgttaacagtttttccatctcgcttgaaatatcatggtcttcagtcggcaaaatgcggtccgcatattcaatcacagtgatattgacgccgaaatcgttcagcatggatgcccattcaattccgatgacaccgccgccgacgatcaacatggattggggcagacgctcaagctcaagcgcttcatctgatgtcagaatatatgtaccgtctgcttctaaacccggcagcattttcggccttgaaccggttgcgataatcaattgtttcggtatcagcatgtcgttttcttcaccatttgcgtattcgacggaaaccgtaccgggaagaggtgagaagatggaagggccgagcatacgtccgtacccgttgaatacatcaatcttcccctttttcatcaagtgggcgacaccgccggccagccggtcaacgattccctgctttcgtttttgcacgctgtcaaagcggagggagacaccttccgtttcaatgccgaatgctgccgcttcctttgcggttcggtacacttccgcgcttcttaacagcgctttactcgggatacatcctttatgcaggcatgttccgccgagcttttctttttctacaacggccgtttttaagccgagctgggccgctctgatggcggctacataaccgcccgtgccgccgcccagaatgaccacatcatattcagtcgccatttgttttcactccttcgccgatctgatattgctttgactgctcctcgccggctaaaacccgaagcgcgccttgcgcgagagattgcagttcattttctcccgggtacaccagtacatccgaaatccaatctatgtacgatctgatggcggatacgaaacttttcccgtacgccaatccgcccgtcaggacgataatgtctacttttccttttaatacggcgcttgccgccccgatttcttttgctacttgataagccatggcgtcataaatgagcctcgcatgctcatctccggcctgaatgcgtttttccaccttcaccgcgtcagttgtccccaggtagccggagagtccgcccgtgccgacaagttttttcatcatatcggcttttgaatacttgccggaaaaacacatctccaccaaatcacccgcaggaacggttcccgcacgctccgggctgaagggcccttctccgtgaagcccgttgttgacatccgtcacccgtccgcaatcatggaccccgactgtgatgccgccgcccatatgagtgacgatcatcttcatctgttcataccgtttgccgagggacgccgccgcatgacgggcaacagctttttggttcaaagcatgaaaaatgcttttccgcttgatttcaggcattcctgatactttagcgagcggagtcatctcatccaccacgaccggatcgacgatatacgcggggatatttaatccgtctgctatttccctggcaataattccgcccagattagaagcatgctggccgttgtagccgtttttcaaatcagtgatcatggcgtcattcacttcatatgtgccgccctcaatcggtctgagcaggccgcccctggcacaaacggcatcaaactttgaaatgttgatgccctgttcgtgcaaagactcaagaatgcttatttttcgaaattcgtattggtcgataatgccgttaaatgctttcagctcttcttcgggatgccgcagcgtcttttcaaagatacagcgttcattgtgaaagacaccgattttcgttgatgttgagcctggattcagaatgagaatgcgtttttcctgttcgaacattttcatacctccagatcaaattcctatcgtctgcttaatatactttggccgttttgcagaaactggcttcttgaacggcgcatgcgctcaattcgttcctcagccagacggtcggccgctaagtatgtcggaatgccgtcacgcgcggaaatatcgagcacccgctcaatgtttgcatagatgccctcaacctttttcaaagcacgctcagcgttgtagccgtaaagctcatcggccacattgatgacgccgcctgcattgatgacataatccggagcgtacacgattcccatttcatgaatggtatcgccgtgacgtgtttctttcagctggttattggccgcccccgcaatgactttcgccttcagctgtttaatcgtgtcatcgttaatgacggcgccgagagcacacggggcataaatatcgcacgcctgtgagtaaatgtcgccgggatcaacggcgcgggcgccgaagtcctcaacggcacgtttaacagattctttattgatatcggttacgattaaagaagcgccttcttcgtgaaggtggcggcatagattgtaagccacatttcccacgccttgcacggcaattgttttaccttccagtgaatcagtgccaaacgccgctttcgctgcggctttcatccctttgtagacgccgtacgccgtaaccggagacggatttcctgatgaaccgaatgccggagaaattccggttacatagtctgtttcatcatgaatgatgtccatatcttcaacggtggtgccgacgtcttccgccgtaatataccttccgtttaagccttggatgtagcggccgaacgcgcggaacatttcttcatttttatctttgcgcgggtctccgataataacggttttcccgccgcctaagtttaaaccggcagccgcatttttataagtcatgccttttgcgagtctcagtgcatcttcaatcgccgcttcctcactgtcatatgtccacattcttgttccgccgagtgcagggccgagcgtcgtatcatgaatcgcgatgatcgcttttaatccggattgttcatcttggcagaataccaattgttcgtaatcataagtctccatatatttaaaaatttccataggttcgttcctcctactgttcttgtgatgcgcaaatcgcaagcgcaattgaatacagtttattttctgcggtatccgctctgctcgttaatgcaatcggcgcttttgcaccggcgatgacagcagcaacatttgctttcgcaaaataaatcattgacttataaagcatatttccggcctcgattgaaggaaccaagagaatatccgcctggcccgctacgcttccggaaatccctttttgcagcgcagccgcttgggatacggcattatccaaagcaagcggtccgtccgcaatgcagccggtaatctgtcctctattgcacatctggacgatcgcagccgcgttcagcgtcgcctccattttcggattaaccgtttcaatagccgcaaggactgcggctttcggcatagggttccctactgaatgtgcgacatgaaccgcattttgcagaatatgcccgagctcttcaagagacggggcaatgttcagcgctgaatcagtcacatacatcagccggtcatagtccggcacttcaaaaacggctacatgtgataacaccctttttgaacgaagcccttcctggcggtttaaaaccgatttcagaagagttgagctcgggagattccctttcattaaaacgtccgcctcttgttcacgcactgcgcgcactgcttttgccgcagattcttctggtgaatcggcgtggatgatgtcagcattgaacttcggctcatttgccagaagctctttcagctttccgctgtcacccgtcagtaaaaatcgtgccgacaagtgttctgccgccattttgacggcgtggatcacttctttatctgctgcgtgggccactgcaatggtttttgcgttttttgccgcggctttttcaactaggtctctcagcttcattttgtaccacctttcttgtgcgaatccgcttttaacaatgcaagttctgtgccaaatatgcgaaagggtttattccggcttttttcaagaaaacatgcagcggtttgcgctttctctgcaatttattgcatgccgtcatttgcaaggccgtacttgtccattttgtagtacagattccgaatgctgacaccaagcgctttcgccgttttggttcggttgaatttatgcttttcaagcgttttttgaatgatgtgcgcttcaaatttttcaacagcctgagacagcttttccccttctacatccggaaaatcactttgggtgccgtttttgtcattcagctctgattcgaaaacaggcagatgctgctgttcgatccgttccatatgcggctctaaaaatatcattgcccgtccgagaacattttcaagctcccgtacgtttcccggccagctgtaggctgataaagctcgcagcgcgttcggcgtgagcccctttacattgcggccgtaatcctgattgattttttcaatgagccgaatgctcagcgcttcaatatcttctttgcgctgccgaagcggcgggattgagatcggatagcggttaatccggtaatacaggtcttcgcggaacgcgccttccgccatggccttttcgatgttgacgtttgtcgctgcgataattctgacattgacagaaatcgcttttgcgccgccgactctgataatttctttttcctgcagaactctgagcagctttgcctgggtgctttgggtcagctctccgatttcatctaagaaaatgctgccgttattcgcttcctcaaaaagtccttttttgcccccgcgcctcgcgcccgtaaacgcgccttcctcatagccgaaaagctcggattcaagcagggattcagacagggccgcacaattgacccgaatgaatttattgtattttcggtcgctttcattatggatggcgtgggcgaaaagttctttccctgtgccggattctccccgcagcagaatcgtcgccggcgttttcgccccgagcttcgcctgttcaagggcaaccagcatttgttcactcgtgccgataatgtcatcaaacgtgtatttcgcttcaagcgtgcggatgatctggcgcgcccgattcagctcagcagtcagcgttttaatttctgacacgtcgtggatgacgccgacgctgccttttaaaataccatccacaataacgggggcaacatttacgatgacatcctttttattggggccgaccttcatcctcacaccccgcacgggccgccttgtccccaatactttcaggtgcatgctttccccttctgagatatcggtggaagcgggttttccgatgacttcgctttctgacagcccggtcatttttgtatatgctttgttgattaacattccgatgccgttttcatcaacgacggaaatggcctcgtctgacgattgaataatcgcttcaagcatggtgcggatttgttttaagttcgtgacctcttccgccagttcaactgcgtcggtgatgtctttaaacacgcataacgcgccgagaagttttccgccttcatcaatgatcggcagtcttgtcgtgacaatctgcaggtgcttgccgagaagctgcttctggttatattccggctctctcgtttccagaatccgcggcagctttgtgttcggcactacatctttaatttggcggccgatgacatcctcccgttttcggccgaccattttttctgccatctgattaaataaaatgatcgtttcgttgacgtctataaaaatcatgccgtcgtgcgttgaattaaaaatccggtcatgcttatacgtctgcgacttcagcatttggataagctgctgtttttcctccatcagctgaaacaccatgtacgccaattttcccggcatgacgatggtttgttcttttttctcatggagcagctcatccatgaccgctttatcgcctgttgtatggatgataatatctatatcttcagttatgtagggtttccaatctgatgaggttgcaattccatatctccgggcttcttgcagcccttgcgcctccggatcttgatcaaccaccgcaataatccggatcagttttgttttcatcaaaatctgtaggagcgccgtgcctcctttaccagcacctataatcagcaccttctgcatcccgatacccctttatatgaaaaaatttgcacacctgtatttcccgttgcaataatttgcacaacccctatgttaccacgttttgatctcttgacaaaatattttttcgattggacaataaaggaaatcatatcgtaaaggggttttctgaatatgagccggcttgttgcgcttttgattctggtcctccccggcgctgtcgcggcgctcggcattaaactgatgagagatgcattattcgggcatgcgttttccccgtttccgtccctttttcttcagggggcggccggattggcgttttttttgttcggcctttatgttctggccgggtttattttgtacagagatcggaaacgcaatcaagtcagcccgcggttcaggaaaaaaaagctgtaaaaaaagcccttgcaaaaaagggctttttcagtcgtccggcagtatcgttttggcaatggattgatccagttcttcatagtcatcgtaagcgatcgtttcatataattcttttctcgtctgcatatccgaaagcccctctttttgagagccttcttctttcagaaggcggaaaatacgctcaaaagccttggcagccgttctgagtgacgtgaccgggtaaatgaccatctgacagcccatatcggaaaattcatcagcactgtaatacggcgtttgtccgaattcagtcatatttgcgagaatcggcacactgatttgtttggaaaacgctctgaattcactttcgtattggagcgcttccggaaaaacagcgtcagcacccgcttttatataagcggacgccctttttaatgcccctccagcccttcctgctgtctggcgtctgttctcgcaacaacaagaagagtcggcgcggcccgcttgaccgcttggattttttgcgccatttcttcaatcggcacgagctgcttcccattcagatgtccgcattttttcggcaggcgctgatcctccatttggacggcggccgcgcgcgcttcatacatttctttcgccgtccgggcggcattcagcacgcctccgaaacccgtgtcaatatcgacaaggacgggcagatcagacgagcggaccagatctttaacccgttcagccatttccgccgacgtgatgatgcctaaatcgggcagccctctgctcgccgtgtaagccgcgcctgataaataaagagccgaaaaacccgttttcttggcaataagagcggccatcgcatcgtgagcgcctggaatctgcaatagatccggcgctgccatcagcgtacggaaccgctctgcaagctcctcttgagacgactgcttgctgacgatccacgtcatgtttgtcaccctcctattttatatgagaaataagtccataaattcactaacgctgagcttctgcattcggccgctatctttacaggcctcttcgattttccgctgctgcttcaatgaaaaatgagtgctgatgtttgctgaaaacttggcaagaatcttcggaacggcttcttttctgcggaaccggtgcccgagcggatattcacattcaatccgtcccgtagccgtgccgtctgtaaaatgcacctgtacggcatttgagatggatcgcttattcgggtctaagtaatcttttgagtacgctttatgttccgtcacctccattttgctccgcaatgtatcaattcgcgggtcagacgccgtttcctcttcataatgatccgccgtgatatctccgaaaagcagcccgattgccgtaatatactggaggcagtgatcccggtcagccggattgtgaagcggcccttttttatcgataatccggattgccgactcatgggtcataatcgtgatcctgtcaatgtcttcgatgcggtctttcacctccggatgaagccggaccgcgcactccgccgctgtctgggcgtggaattcagccggataggatactttaaacaaaacattctccatcacataggacccaagcgggcgggcaagcttcatttcctgccggttaaataatacgtcttgaaatccccacccggatgcggtcagagccgtcgggtaccccatctcacctttttgcgccataagggccaaatatacgcctctgctcgtcgcgtcgccggccgcccatgatttgcgtgatccggtgttcggcgcatgacgatacgttctgaggcttgaattatcaatccaagcgtgagatacggcgttattgatttcctctcttgagccgcccagcatttgtgcgcaaacagccgcagtcgccaccttcacaaacagcacatggtcaagcccgactctgtttaaactgttttccaaagcgagaattccttgaatttcgtgcgctttgatcattgcgcaaagcacatcacgcacggtaagcggttctttcccttctgaaatccgcactctggatatataatccgcacaagccaatatgcctccgagattgtcagacggatgcccccattcggccgcaagccacgtatcattataatcgagccacctgttgatacagccgatattaaaggcagccgtgaccgggtctaaaacaaaaggcgtgcccgggactctgctgccgttgggcacggaggttcccgggacaatcgggccgagcagctttgtacattcgggatagctgagcgccaaaattccgcagcctatcgtatcaagaagcacatgtcctgccgtagtgaaagcttccgaactgtcaatctcctgatggagcacgtagtcagaaatctcttcgattacggcgtccattcggcggggttctgtcatgttttcatcttcctttctcatctgtttacagacgcgctccggtatagcggacacgcgggcggaaaagccggtttcggctgtgctgttcaatgacgtgggcgcacagcccgaccgtccgtgcgctgaagaatataggcgtatacagcgggatcgggatgccgagcatgtaatagaccggcgctgcgtagtaatctaagttcgggtaaaggccttttttctcccgcatgacgatttctcctgcttcacacatatgataaagacggaaatcacctgaaagatcagacagttttttcaacgcttctttcatcatgagcgccctcgggtccatttttttcatgtagacacggtggccgaagcccatgattttttctttgtttgcgagtttttgagttaataattgtgtaaacccgtctgtatccttcgcttcctcaagcatgtacataactgcttcgttcgctccgccgtgaaggtttcccttaagcgaggcgactgctccggtcagagcgccgtaaatatccgattgcgtcgaagcaatgacacgggccgtaaacgttgagttcggcaattcatgctcactgtataaaagaagcgaccggtcgaatatttcttcttccaaggaggacggcgtttttccggtaatcatatataaaaagtttgcgctgtacgacaaggttccgacaggcgctaaaggctccagtccgttgatgactcgatagctgttgacggtcagattgggcattttgcctatcagcccgcggacacggtgccgatttacagaagaggtgcggttatcaatatccttatcaaagcctccaagcgcggacaaacctgtcctcagtccgtccatcgggtgagtacgttcgggcagcagacggcatatacgcaagatttcctcgggaaggtgtccgccgcgccgaacgtcttcttcaagcgccttcttctctttcgcatcaggaagtctgtcttccaataagagatgaacaatgtccatatagccggccgttttagaaagctcaatcagatcgtggcctttgattaaaatactgccctgctgtgtatccaggaaagaaatccccgtttccaccgcaatgacgccatctaaaccgggagaataagattccatagtttcgctcctttgcgcactttttattgaagaagatacttagaaataatcagcctttgaatctcattggttccttcatagatttgcgtgactttcgcatcccgaaataaacgctccgcgggatactctttcatatagccgtagccgccgtgaatctgcacagcctccaccgccgctttcatcgccgcatcggacgcgaattgcttcgccatagatgcttcttttccgcacggaagccctcgctgatacagatcagccgcatgatagaccaataatttggcagcttccgcattcgttgccatgtcagataatttaaatgaaacggcctgattcgaagcgatgggtctgccgaactggctgcgggttttggcgtactccgccgagcagccgagcgccgcttcgataatcccgagcgcctgagccgctatgccgatccgtccgacgtcaaggtttttcatggcgattgaaaaaccctcgccctcttcgccgagccggttttcaatcggaatttccgcttgatcaaactgcaattcggcagtattggaacctaacaatccgagctttttttctttttttccgacagaaaaaccgggtgtgtttttttcaacaataaacgctgaaattccctttctccctttacccggatcggttacggcaaatgtcagatacagatctgccgctccgccgtttgtaataaagatttttgaaccgttcagaatatatgaaccgccttttcgcacggctgttgttttcaggcttcccgcatcagatccggagtgagtctcagtaagcgcaaaagctccaatatattcgcccgctgccagcttcggaatatacgtttgtttttgggcttctgtcccgaaatgcaaaatcgggattgtccctaccgatgtgtggacggacaaaatgacgccgacggccgcgctgacttttgatatttcatgaatcgctaaaatgtaagatgttgtatcagcacccgccccgccgtaagcttccgggacgggaatgcccatcaatcccgcttcgcccatttttttaatcagccgctccggaaattcatctgttgattccatgagctcaaccatcggtgcgatttccttgcgggcaaaatcacgcaccattttcctcatcatgatgtgctcttcagtaaaatgcatggctgccgtctcccctcatgatctttacgtcatctgccgtactcataaaaaccgcgcccgctttttttgccgagccagccggcgctgacatattttctgagcagagggcatgggcggtatttcggatctccgagccccgcgtagagaacctccataatggaaaggcacgtatccagcccgatgaagtcagctaatgttaaaggacccatcggatgacgcatgccgagcttcatcacctcatcaatcgcttcctttgaagctgctccttcgtaaaggcaataaacggcttcgttaatcatcggcattaatatgcgattagatataaagcccgggaagtcattgacttcgacaggggttttattcatccggacggcaagcttctttactgtttccgccgtttcttccgatgtggcgagtcctctgatgacttcgacaagctccatgaccggaaccggattcataaaatgcatgccgattactttttcaggcctttttgtggccgcggcaagctccgtaataggaagagaagacgtattgcttgccaatacggcatgagggggacagattttatcaagtgtgtcaaacaattccgcttttgcttttttgttttcggcaatggcttcaatgataaaatcagcatctcccgcttctgtgagctccgccggggaaatacggctgaaaacggcatctgtctcctgctgtgacttccgtccttttgcctgctctttctccaggtttgtctttatgcggtgaagaccttttgttaccgtttccggctcccaatcgtataacttgacggcaaacccggcttctgcagccgtctgagcgatgcctgcccccatctgaccggcacctgcgaccatgattgttttcatcttcatccggcgctccctcctttgatcagtacacctccagcaggacggcatctccttgagccgctccgctgcatatagccgctatgcctaaccccctccgcgacgctttaattcgtatattaaactcatgacgattctcgctccgcttgcgccgatcgggtggccgaacgcgattgcccctccgtttacattcactttctcccggctgaacccggctattttttcactcacgagcacgacggacgcaaatgcttcatttacttcaaacaaatcaatatcgtcaacggacagtccggtttttttcaagagccggctgatggcctctcccggcgcgcttgccagctcggacgcttccagtccgacggacgcaaagccaagtatcgctgcgagcggcctgacatgctgctttgctgctttttcctctgacatcagcacaaatgctccggccccgtcatttacaccgggagcgtttccggctgtaaccgttccgtcggctgtgaaaatcggcttgagcgctgcgagctgctcaaggcttgtatcaggacgcagcccctcatccgcttcaacgatatgctgtttgccctttttgccggtccaggtgacggggacaatttcttcacgcaatttgcccgcatcagccgcctcagccgcgcgtttctgactcaaaagagcgtaatgatcctgttcatctcgggaaatgccgtactttttggccgcagtgcttccgtggacagccatatgcacctggtcgaacgcacaggtcagcccgtcatgaaccattaaatcctgaaaaaccccgtcccccatcctcacaccccagcggccggccggaatggcgtacggaatgttgctcatgctttccattccgcctgcaatcagcacgtccgcgtctttcgcccggatcatttgatcacagatggtaacggctctgagccctgatgcacagactttattaatggtttcagccggaacagaccacggaagcccggcatatcttgcagcctgccgtgccggaatttgcccggcacccgcctggacgaccatccccatcaccgctccttccgcttcgctttcactgatagcggcgcgcttgattgcttcttttatggcaatgccgccaagctcggatgccttcacctcttttaatgcgccgccgaattttccgaacggcgttcttgccgcactgacgataaccgtttttcccacaattttgcctcactttcaataagataaaagataacgcttacacaaaacgccctgttacaatatatgaaccggctgaccgagttatgagtgcaccgcctttttcccgcccataaaaaaagaagactgtctgaccagtcttctcagctgcggcattcttcttttatagaaacagccagctttggataatctgtaaaaatcgcgtctatccccgctttcatcagccgcttcatatcctcaggacgattgacggtgaacggacggagcgccgcttggtgttttgcaagatgtgtgatcacttcagcgctgaccgccggcgtgccgagcttcggatgataacccgaagcgggaatggcggcaagataacgttcaggccggtacagcacatccattgtcagcaccgcccgttcaatttcaggcgccagggcgtggcacaccgcgagactctcatgattaaatgaagaaaaaataacgcgcttttccagtccgtaatatctgacttttttgatcacttcttcttccattccttcgtaacggaatacactgtttttcagctcaatgtttatcagaaaatcagcacgttcagcaaaacgcagcacatcggacaaaagcggaattctgacacctttaaaagaatctttccattttccggcggcatcggcggttctgattttgtcatacgccgtatctttcacaaatcctttcaaagatgtcgtgcggtcgagggtttcatcgtgaatgaccacgatccggccgtcttttgtcatctgtacatcaagttcgattccgtcagccccgtcctcaatcgcttttttgaatgcgggcatcgtattttcagggcagtcgcccgacgccccccggtgggcaaaaatattcgtcatatgtgtcacctcagatgtttgtcatcggttttctctattataatcgttatgcacatcaggagggcgctatttacacatattttatcattaccgtccgctgtaataggtttcgattccgtttacaacggcgtccgcggcgtgctcttgtccgttatcgcttttcagcttgtccgcatcttgaggatttgtgataaaacctaattcagccagcacactcggcatctttgaatatgtaataacataaaaaggagcttcttttacgcctctgtccctcatccctaaagacgtgacaagctgctgctgaatgtcggaagcaagcctttcgctgtccgctccttcatatgtcgaattaaaatacgtttccgcgcccgatgccgttgatacggctgaattggtatggaggctgacgaataaatcggattggctggcgctcgctttcgccacccgctcgtccaaacgtaaaaaagtatcatcagtccttgaagctacaggttttgcgccttctgtctccaatttggcgatcaccttgtttgacaccgctaaattgatgtttttctcaagcagtccatttccgccggccccgctgtcttctccgccatgtccggcatctatatagatggttttcccttgcaaaggttcggctgcataagcggacggcgcaagcagaagcagagcggcaccgaaggcagcagcgctttttgtcagtaaacccacgtttttttcctccccgttttcacatatctgtttcttttttcagtttctcaagccgtaattgtccgttgctctcttttttataggtgatttgcaccgccgtatgttcaggcagcgactgacattcaaaccgcttagcgaaaggcaccttcacctcttgcctttctccgtcaatttcgaccgcgatcgtatcgtttccggccgcttttataaatgttccttcctgtgtaaatgacggcgccgcatcagcctccgcggtatactcgcagcctgataacagccatgcggtgaagatcagaagtatggcagacttcacacagatcacctcacgttttctcattcggctttatctttgaacagaatggccgatttgtaaagggagcctccattcctccagcgtttttccatctttggaatgaaggctatctgacctgctgtttacctgaacttagaaagaaaacaagctgatcagtctatgaaaaaggttctgtctgaaggccgaatatgcagaatttaacggaaacggacgactttctgttcattttgaaaaaatatcagatcggcaaaaaagagagccgcgtcatgcactctcccgaatagaaacattcatatttattttgagcttttcataaaatgaacgggacaacttaaaagagcagcgtattggcggcaatgatgagaataatcactccgctcagcaccgtgctgaactgtccgacgtgaaaagaaccgatgcgcaatgaagcggctttttttccaagcgagcagccgatccatatggtcagaaagcttccgaccgccgcagtaatggaaatggcagcgggagaaagcccgatcaaccccgcgcttaatccgttggtcagcgcatttgcggatacggccaccccgagaaccaaggattccaatataccgatttctcccgaaccgtcggcatccgctgcctccggattttgcagcagaccggcaaaacggcctttttttcctgacccgccaacacgcgctgtttttctcggcacagccagcagaatgatgcggataccgatgacagataaaataaacgccgccagcaatacaggaagaaagcccggtaaaacggctgaaatccatttgccgaaataaattccgatataactgaatacaaaacagataaaagcgatcatcatatttgacgcatgcgatattttgatttttctgatgccgtatgacatccccactcctaaattatcaatgcttgaggacactgccaaacctaaaatcaataaccaagccatgttcgtttctctccattctttgatgtcttttcaacatgttgtgccgttgaatctacactatcctattcagcagcacagaaaaggtaccttttctgcaaaaattattgattgacgatcatcattccggcggaaacgaggtgacacccttgacagaaaataaaaataagacactgggaccccttttaaaatcactgcttgataagcactcgctctccatgagaaaactcggcgccttaacaaacattgatacggccactatctcccggattatcaacggcaaacagaaggccaatttaaagcatcttcaggaattttcaaaacacctccgcaccccgctggaggaattgcttgaggcgtcaggcatagacatcggccatgaaaaagaagctgcgccgcaagacccgatgcacgcgattcaggatatgctgaatatggccgagatgtttgatcagcctttttcccgggagcaaattgagcgtgaactgaccagatatgaacaatacgccaaaacccagcagggccatcgcctgatttgcgatgagtttcaaaagaaaatggacaatgaagaaagcgtcggcccttttattgaccatttgaaaaacatgcatcatcagtatatggatgaatcaacaccggctgaagaccgcgcgattctcgggagcgcgctgctgtattatattttagcgaccgacgttatcccggattacatgtttccgatcggctacctggatgacgccatcgccgttcaaatcgctttgaaccggctgaaaaaaaagtaaaggcgcttaaaaaagcgccctttttgtgttgaaaaatatgaaacaccgcattacggttttgtcaaaacagagacagccgtcatatgatacatcaacctaacaaaaaggagggtgtcttctatggacagcaacacagttgtggcagtgtgcgctctgttaagtgttgtgattcagatcggaacgatattcgccgcaggaaagtggaaaaaagaataaacaaattgacggttttttcgcacaagcgtatgcttataaataaccatgtaaaagataagaaagaagatatgcatatgaaaaaaatcattctcctcttcgccgccgctgtcatattcagctcgatcggccatcaaatttcaggaggatataaagatcctgaaaaggaacggagaaaaccgtttcattcgtttaaatggttcagccggtcataacctcaggaagaagaacaagcaaaataattgcacacaatgaaaacataagctagaatacggacgagttaaactcctaaggaagaaggcgaaatgatgaagcaaacttataaaccgctgtttgaaccttttacgttcgaaagcggtgtcactataccaaaccgtatttcagtcgcaccgatgacacactattcatcaaatgatgacggaacgatttccgaccgtgaattaagctacattactccccgttcaaaagaaatgggcatggtcattacggcatgtgcaaacgtaacgccggacggcaaagcgtttccaggccagcccggcatctatgatgattctcacattcccggcttgaaaaaactcgctcaggcgatccagtctcaaggagcgaaagccgttgtgcagattcaccacggaggcttggaatgccctcctgaactcgtgccaaacaacgacgtcgtcagtccgagcggctcagaagaagacggcagacaaacgtcccgtgctctcacagaacaagaaattgagcacatcgtgaaagcattcggcgaagcgacacgcagagcgattgaagccggctttgacggtgttgaaattcacggggcaaacgggtacctgattcaccaattttattcaccgaaaacaaaccggcgcacagaccgctggggcggaagcgatgaaaagcgccttgcgttcccgcttgcagtcgttgacgctgtcaaacaggcgattgatacacacgctgaaaatccattcgttctcggctaccgcctgtcaccggaagagccggaaacaccggggcttacaatgaaagaaacattcatgctcgccgacgcgcttgcggaagagaacttggattatctgcatatttcactgatggatgtcaattccaaagcccgccgcggcgcggatacttcacggacccggatggatttattaaacgaacgcgtcggccataaagtgccgctgatggccgtcggttccatctataccgcggacgaagcgcttgccgtattagaaagcggaattccgctggtggctctgggacgtgtcattttgattaaccccgaatgggcggtgctggtcaaagaaggccgcgaacaggaaatcgaaaaagccattcaggcatctgaaattgataaataccgacttcctgaaccgttatgggaaatgattcagaatacaggcggctgggtgccgtttgaaaagtagactaaaaaactgccggatgtccggcagtttttttgattcacaagtttttaccgctttgtttactcctatttctaacacacagcgtacatatagtaaatagattaatagaaaggagaccgtatatgatggctggtttccctattacgattaacagtctttccggaaacggggttgtcaatgtcggcggtgcgttttcgataagtcctttaaccgtatcaaaaaccgtctacggctcaggagggggaaatacaggtatggtcctgcaaatgaatcaatccagcacatctcaatcttcaaactctcaatactctgatcaaaatgtaacgaaaacattatgatatccgtatttccctccctttccggctggcagcagccggattctttttgccgttttgtttaatcttattccatatcacagcgtacatatagttagtagactgtgagagaaaggagaaaaaatagaatgagcggttgcccgattacgataaacaacgtatcaggaaacggagttgtcaatgttggcggcgccatatccatcagtccgctgactgcatcaaaaaccgttttcggtgccggagggggaaatatcggcattgtcattcaaaacaatgctgtaagccagtccaaaatgtttgaacatcaattttcagatcagaatattgtaaagtcattgtaagggccgccatgctgcccttactgcataaataaagcaggcgcatgctttcccgaaaacttgattttaaacatcagcggtcaccttctcatgttttgaatgatttcagttaaagatgaatagaatgcagattgaaagcatgagtactgaatctcattaaggaaagaaggaatcgtgatgaaaaaactttgccgggaagtttggattgaagttgaccttgatgcgataaaaaagaacgtacgggcgatccgccgccatattccgaatacgtctaaaattatggccgtcgtaaaagcgaacgcttatggccacggctctgtggaagtagcgcggcaggcactggaaagcggggcgagcgagcttgctgtcgccagcgtcgaagagggaattgtgttacggagagcgggaattaaagcgcctattcttgtgctcggcttcacagctctcagctgtgtgaaaaaatctgccgtttggaacatcacattatcagcgtttcaggtcagctggatcaaaaaagcgaatcggatattggaaaaagaagcagagtcgaaacggctgtccattcatatcaatgtggataccggaatgggccggctgggtgtgcgcacagaagaagatcttttagcagtggtgaaagcgctcaagtcgagtacatacctgtcatgggatggcatctttacacatttttcaacagcggatgaaccggacactgagctgacgatgctgcagcacgaaaagtttatcagctttctccgctttttaaaaaatcaagacattacgctgcctaccgtgcatatgtgcaatacagccgccgctatcgcattcccggaattcagcgccgacatgatccgtttaggtattgggttatatggtttatatccgtccgcctcgataaaggaactgaacctcgtggatctcacacccgcactaagtttaaaggcgcgtatcgcttatgtgaaagctatggtgacagatccccggaccgtcagttatggcgccacatatatcgccgaaccgggtgaaatcatcgcgacgattccgatcggctatgctgacggttactcccgcgccctgtccaaccgcgggtttattctgcaccgcggcagacgggtgccggtggcggggagagtgacaatggatatgataatggtcagtttaggtgagaatgagggcaaacaaggagaagaagtcgtcatctacggcaaacaacaaggagccgagatttccgttgatgaaattgccgaaatgctcggtacgatcagctacgaagtcctttctgtgttaagccgccgcatcccccgcttttatttcagagacggcaaaatcattaaaatatcagctccggtattatacgtatagacggcagttcccgtatttatgtatagaacaagtaccggcgtgagtggttcccattgttttcgtcagcaaaatctcaaaacgccttctcttccgcgttcatgcacggaatagaaggcgcaaaaagacatttagccaaaggcttgcgttacgaagctttatgctccaatctcagcttgtcagcaaccatcgcgatgaactctgagttggttggttttgcttttgtcatgcttaccgtatatccgaacagtgaagaaatggaatcaatatttcccctgctccatgcgacttcaatggcgtggcggatggcccgttctacacggcttgcggtcgtgttgaattttttggcgatgtcgggataaaggacttttgtgatgctgccgaggagttcaatatcgttatacaccatggaaatggcttcacgcaaataaagatagcctttgatatgggcaggcacaccgatctcatggataatgcttgtaatgctggcatcgagatttttccgcttcggctccggctggctgcggataatgctgctttgcgcagacggcgcacggtgtgtgacactgctgacatttccgcttacctggcggatatggccgacaaggttttccatatcaaacggcttcaggatgaaataggatgcgcctaaatcgacggcttttttcgtaacgtcttcctgaccgaatgccgtcagcatgatgacgttcggctgcttctcaagctctgattcacgcagacgctccaaaaccgcaagtccgtccagatgcggcatgataatgtctaacacgagcacatcgggattcttatctttaaacaaagaaagacattcctgtccgttataagcaacgccgatcacttccatatcatcctgtccctctatatattcactcaacaggcttacaagctctcgattatcatcagcaacacaaactttaattttctccacgtttcttcctccccaatgtattaacaggacgcaacccatttgactgctatatgttacattcgacaaaaccactacttccccttttaaaaaatccatatttaccaataatagtggtatatctttgtttttctagcattttctaggtttttcgactaaaaattaagtttgacaaatcaggaaacgtgaatttgtcgaaaaatcttcatgtcttattttacatgaatcccggaaagaagtgaagaacgcatcacataaaaaaactgccggatcatccggcagtcagcttgctttgtctttcccgtaaacatcaacacccgcttcagacagcatccattcgatatgaacgccatagccgcttgtcggatcattgacaaatacgtgggttacggctccgacgacctttccgttctggatgatcgggcttccgctcatcccctgaacgattccgccggttcttttcagcagtttcggatctgtcactttcaataccattccctttgtcgccgggaatttttgcggcgtggtgctgacgatttcaatatcaaatttctctactttatcgttttcgataaccgtcagcatttgcgcaggtcctttttttacttcatttgacaaagcaatcggaagcgctttgtcggaaatgttgtttttaatcggctgatgcagtgtcccaaaaatgccgaacgggctgttgcggttaatatcgccgatcgttttccgttctgacgaaaaccttgccagtttttcgcctggattgccgccttttcctttttcaatcgatgttacagtagaacggacgatttctccgtcttctacaacaatcggtttttttgtatccatatcagagatgacgtggcccaatgcgccgtatttttttgttttcggttcaaaaaatgtcatggtgccgatgccggctgccgaatcacggatataaaggccgattcgatatttcccctcggcttcgtcctttgtcggaatcagctttgttttgattttttgcttatcgcgtttcaccaataaatccagagattcaccggttttgcccgctttttgaataaacggggcgatgtcgctcattttttcaattttatgtccgttcattttaataatgatgtcgccagattcaatacccgcttgttctcccggagactttttcccatcctttgtcatcacctggtgaaaaccgacgaccaaaacaccgactgaatgcagttttacaccgatggactgtccgcccggaatgaccttcaattcaggaaggacacgcactttcgtttttttaatgggaaatccggcaagatcatatactacttctgacctgccttgtgtttgccctgttatgtttgcatgaccgtgctcttctttcagcgtaaaggcttctgataattcgcccttttcagcgcttattgatgcattgaccggaacggcctgtgtctggttttcaaagacgctcatttctgacggtatcagtaaatattctttaaacggcttaaaaaagcctacacttagtaaagaaacaaggagaattacacctattgctttcctcatgttatcgtgcattcattccttcactctcctcgctcctatcccacaccactttctttttctgctacatctatacttttgccttcctgcgcttgatttataaccggcatacgaagaaaaacattggatacactgttagagaaatggaacaaaaaataagctgcctgtatcagcagcttatcctgtcgtttttacctgtccggcctgttttaaaagctcttgtgcatgccgttttgtcagatcggtcacttcaacacccgcaatcatgcggccgatttccgctaccttatcctgcttggaaagcggcgtgacatgcgttgtcgtccgtccgtctttgaattcttttgcgatcagaaggtgcgtatccgccatagcggcaacctgcggcaggtgtgtaatgcagagcacctgtgaaccggtcgatactttatggattttttccgcgatggcttgggcaacccgcccgcttacaccggtgtccacttcgtcaaagatgatggaggtgacatcctgctgggaagaaaaaatactcttcatcgccagcatcacccttgaaagctcgcctccggaagcgacctttgacagcggttttaaaggctcaccggtgtttgttgaaattaaaaacttcacaaggtcgatccccttttgggtaagctgcacgggctgcccgttaacaaccggtgcttcactggctgacggatcggttttcacgagaaattccgtatcaaacgttgatttgcccatatacagactttgtaattcctgatgaatcgcttccgccagtttcttggcccatgcttttctgatttttgataaattggcggcttctacggccacatctttgccgaccgactccaattccttcttcagggcttcaaggtggctgtcgcggttctcgatttgatcgatttcctcttctattttagagccgtattccaaaatgtcttctaccgtcgctccgtatttgcgcttcagctgtttgatctcatttaaacgggtttcaataaaattcagccgttccgggtcatattccagatcatctaacagattgcgcatttgaaaggttgcatcctccagcagataataggaacttgacacactttcagacagcttttgcagcggttcattgatatccgaaatatcttcaagctgggcagaggccattccgacccagtcaagcccccctgctcgctgcggagcgcattataggcgttttgcaatgattcataaattttttcaaagttggatatctgcttccgctcttcctgaagaagttcgtcttcattcaattcaagcttcgccgactcgatttcttcaagctgaaattgaatcaggtctaaccgatgcgccatttcctgctcgctttctgacagcttcttcacttttttgagcagctccatataacgctcatagccttcatggtaagcctgaagcgcggattcggcctcagcgcccgcaaatttatccaaaagctccaagtgtttgtcgtcctccattaacagctggttatcatgctgtccgtgaatatctaataaaagtctgccgatttcccttaaagccgcaatcgtcactaattttccgttgacacggcagacgctttttcctccggcattgatgtcccttctcatgacaatcatgtcgtcagatgcgtctattccctgctcacggcatacttcaaaaacgggatgaccgctgtccaatagaaacagtccttcaagctcggcctttgtttcaccgtaacggacaaattcggacgagccgcgtccgccgactaatagggaaacggcgtctataataattgacttgccggcccctgtttctcccgtcaggacggtgagcccccgttcaaacgaaatcgtcagttcctctataatggcaaagttttttattgatagttcagctaacaaacagcattccaccttttatctgataattacgctacagcagctccaaaagacggctttgtacgccttccgtatcttcaggcgtcctgcagatgattaagatcgtgtcatctccgcagatcgtgcccatgatttcttcccattcgagattatccatcagagcgccgattgcctgagcattccccggcatcgtttttaatacgatcatatggcttgctgagtcaatttttacgaacgcatccattaatgaacgcttcagttttgacagcggattgaaccgctgatccgccggcaggctgtatttgtaggagccgttgttcgtcggcacctttacgagatgcagctctttaatgtctctggagacagtcgcctgggttaccttatatccttcttctctcagcatgtcaactaagtcatcctgcgtttcaatctcatggcttgtaataagctctctgatttttatatgcctttggccttttgtcatgtaagcacctctgttttcaagctgttcttgtcattatgttaaccgcttcttgataaaaagtacatgatggcagaaaaaaggaataatagccccctattattccggtacatctgtctttttggcttttaatgtctcatgtgcttcgcggacgatacggagaatatcttcttccggcagttcagcgccgtttccgtcttctccgcccattccagatgaagcagaaactcaatattgccgtctccccctgtaatcggtgagaaggacagtcctttcactgtatatccttcagaagcggcaaattgattcatgcggcggagaacgtcagcatgaacgccgggatctctgacaatgcctttttttccgacggattcccgtccggcttcaaattgcggcttcaccagtgcgatacaatcgctccccggtacaagcagcgtttttaaaaccggcagaatgaggcggagtgagatgaaagaaacatcgattgtcgcaaattccggcaaaccctctgtgaaatcggaaggctcggaatagcggaaattcgtccgttccatgacgacgaccctctcgtcctgtctgagcttccaagcaagctgattatagccgacatccactgcgtaggaccgctcagctccgttttggagggcgcaatccgtgaatccccctgtagacgagccgatgtcaatcatcgttttgccttttaccgagacaggaaacacttccaaggctttttcaagttttaatccgcctctgctgacgtatttaagagggtttccttttaccgttaacggaagatcccgggcgattttttcacccggtttgtccaatcggttttcatttgagtatacgatgcccgccataatggcgcgtttcgctttttcccgcgtttccgcaaggcctttttctacaagaagtacatctaatcgttctttttttgctgtcatgatccaattcctttatgtgtcttcggcggcatcagcagttttatccgattcataacctcagccttcgtgagaccgatttcttcaagcagggcggttacgctgccgtgttcaataaaccggtctgggatgcccattctgtcaatcggtgtatgatacatgccgaggtcatgagcgtattcaagaatcgtgctgccgaatccgccttcaagcacagcttcttctatcgttaaaatcggcagaccttcattaagaatggccttcatcatttgtttatcaatcggctttatgaacctcgcattcacgacacgcacggacaggccttctttttgcagttcttcagccgcttccagcgccatttcaatggtcgtaccgaatgttaaaatgaccgcgtcttttccgggacggagcacttcccatgttccgatcggaatggttttcagctctttatccatcttaacgccgagcccgtttccgcgcgggaagcgcatcgcaatcggaccttcctcgtatgaaagggctgtattgaccatatggcggccttcattttcatccttcggcatcattaaaacgaggttcggtatatgccgcaaaaaggcgatgtcaaagacgccttgatgcgtctccccgtcagcgccgaccaaaccggcgcggtcaatgccgataaatacattcgcgttttgacggcagatatcatggacgacctgatcgtacgcccgctgtaaaaaggtcgaataaatcgcaagaaacggcttcataccctgaagcgccattcccgcggccattgtcgccgcatgctgttctgcgattccgacgtcaaacatgcgctcaggaaattctttcgcaaatccttcaagcttagagccgaccggcatagccggtgtaatcgcgacaattctgtcatcctcgcgcgccagctcctgcacggtgccgctgacaagtccgctccatgaaggcgccgcggctttcggcttgacgaaatcacccgtattgattttataaggccccgttccgtgccatgtgccgattgtgtcggtctcagccggtttatagcctttgccctttttcgtaatgacatgcaaaaggacaggacctttcgtttttttggcgtattgcaggttttcaaacagttcgtggtaggaatgaccgtcaacagggcctaaatacgtaaagcccagctcttcaaaaaacatgcctgacacaagcatatattttaagctgtcttttatccgttccgctgtggcggccaattttccgccgacggccgggatgcgcttaaataaatattcaagctcgtcttttacccattgatatttgccggccgtgcgaagccgtcccagcatagaatgaattgccccgacattcggcgcaatgctcatctcattatcattcaggatgacgatcatatcttttttctcatcaccgatatggttcagcgcttcgagcgccattcctccggttaaagcgccgtctccgataatcgggatgatatattctttcgatcctttaatatcacgggcggctgccattcccatcgcgcctgagagcgatgttgagctgtggcctgtttcccatacgtcatgttcgctttcgctgcgcttcgggaaaccgcaaagccctttatattggcgcaaggtttcaaactccttgccgcgcccggttaacagtttatgaacataggactgatgtccgacatcccataaaaatttatctttcggactgtcaaattctttgtgaagcgcaattgtcagctcgacaaccccgaggttcggcccgatatggccgccagaggcagacagcgatgtgatgaggaaattgcggatttcctcactcagctcttccagctgttcaattgacatctttttaagaaatgacgggtcctgtattgataaaagatccaaagcggatcaactcactttcagcatgaatttctgcaaattaaacagtgtctttttgaaaaaagaaaaagactccctttgtattttcatcgaaactgcttacattttaccataggagcggcagccccttcaaatcaggaccgtttttaatgatctctcgccgcgattaaatcacagaggtcatgcagcagttctttctgaagagaaaggccgctgatgatccgtttcgcctcgctgatatgatacgccagcttctctttcgcgccttcaagcgttaaaagcgacggatacgttgacttttcattcgacgtgtctgagccgaccggtttgccgatcttctcctcatgcccttcaatatcaaggatgtcatctctgatttgaaatccgatgccgatatggctgctgaacagacgcagcttttcgacttcatcctccggcgcatctgccaaaatggcgcccgccgtcacagaaaaaccgaggagcttggccgttttccgctcgtggatggattccagctcctcaagcgttatccgcttttgttccgcttccatgtcggcagcctgcccgccgaccattccttccgttcctgccgcgctgatcagctcatcgacgagacggagccgtttttctgctgaaaccgcctcagacacgtgggatgtgatcaatttaaagctttctgtcagaagcccgtctccggccaatacggctgccgcttctccgaagactttatggtttgtgggctttccccggcgcagatcatcatcgtccatgcaaggaagatcatcatggattaaggaatacgtatgaatcatttcgacagcgcatccgaccggaatcccgtctttttcatcttttccgtaagcattcagaacggctaagacgacgagggggcgcagcctctttccgcccgcttccaaagaatacagcatagattttttgaggatttcaggcatcgcaagccgttccgtatacaaagaaagctgctgttcaatcagttttttgcgcgatgctaaaaatgcgtccagtttatttgtcaccttcgtcttcctcctgaacgctgaaaggtgcaagttcgccgttatcttttaaaataaagtccatttgcttttcgacatgctgaagcttttcatggcacatttttgaaagggccatcccttcctgaaaataattaatcgcctgctcaagcggcacgtctccttcttcaagctttgccacaatgccttcaaggcctttcatcgcctcttcaaatgtcagctcttcactttttttggtttctgtcattttcgttcgcctctcttttgcaatacttcacacgtcagaacgccgtctgtcatctttacttcaagcgtatcattttgttccacttgatcaacgcttttgatcagctctttatctttataggccagactgtatcctctctccatcacctgaaggggacttaatgcattcagtttaccaagaaccgtctgaaactgcgaatgaagctgcttcagctggacattcatgcttcgggcgagctgatttgagcgctcctcgtaccgttttttcgcctgtttcagctgggtttcagggtggagcgccgttaatctgtacgtattccgctccagctgcctttgtttcctgtccgtaagccctgtgagctgtgattggaactgctgatacaaaagatcaaactgctgttccttttgggtatacaatcgtttcggaaaacggaacgcgtaggatgactggagcgatagaacccgttcttttttcttgctgatatgctgctgcatcgctcttgtcagccggacttccgccgtttttgtccgttccattaagtccgtcgtatgggggacggcaatttctgccgctcctgtcggcgttgccgcccggatatccgcgacgaaatcactgattgtaaaatccgtttcatgtccgacggctgatataatcggaatggcggaagcaaaaatcgcccgggctacgctttcttcgttaaatgcccacaattcttcgatcgagccccctccccttccgacgatcaggacgtcacacattttttgtgcattggcttcttcaatgcgcttcacaatcgatctgctggcattttcaccttgaaccagcgcgggaagcacaatgactttcacaagggggtatcttcttttgagtgtggtaatgacgtctctgacggctgctcccgtcggtgacgtgacgaccccgatcgtagccggaaaagcggggatggcctgcttatgccggtcatcaaacaacccttcgccggcaagttttttctttaattcttcatatgctaagtagagcgcccccacaccgtccggctgcatttctttcgcgtacagctgatagcttccgctcggttcatagacggaaatgccgcctcttacgatgaccttcattccgtcctcgggcttaaacgcaagcctcgaactttgtctttgaaacatgacggcctgcatgcgggcatgctcatcttttaatgtaaaatagatgtggcctctcgtatgaattttaacattggagagctcacccttaatccaaatgtcttcaagatgagggtccacatcgaattttcgtttaatgtatttggtcagcgcggaaaccgtgacatatgccgcttcactcacatcctgcactcctttcataaaggctttttgccctaaactaagaaaacccgctctggctgaaaggagccttaagaagcgggtatcgtgctcattgtcacactttttgtgactgtctccggttatctatgataacgtacgtctggcagatttaacagtattatgcgcaagcattgtgatggtcatcggacctactccgcccggcaccggcgtaatgaaagatgctttttctttcgcttcatcaaactgaacgtctccgcagagttttccgctttcgagacggttgacgccgacatcaatgacaatggcgccctctttgatttgatcggctttgatgaaattcgctttaccgaccgctaccacaagaatatctgcttttttcgtatgctcagacatatttttcgtacgggaatggcaatatgtgacggtcgcgttttcgttcagcagcagctggccgaccggtttaccgacaatattgcttcgtccgactacaacaacttctttgccggaaagatctacgttcgtctttttcaataactcgacaattccgtgcggcgtgcatggtagaaatgtatcttcgccaagcagcattttcccgacgttgagagggtggaaaccgtcaacatccttatcgggagagatccgctcgattacggctttttcagaaatatgatccggaagcggcagctggacgagaatgccgtggaattccggattttgattatactgatcaatcactgttaaaagctccgcctcggttaagcttgagtcaaagcggtcaagtttaaatttcattcccattgtttcagcggcttttttcttgcctgtcacatatgaaacagaagcgggatcgtctccgattaaaatgaccgccaaaccgggcactacgccttgtgctttcagctcttctacttcttttgccaattgttcgcgtttttctttagccgtttcttttccgtcgatgattgttgcagtcattttctttcctcctatgattcgatatcagttttaatgttagaaagaaccccgtttacgaattttgcagctttatcgtcgccgaaccgttttgccagctcgattgcttcgtttaatgacacgttagcaggaatgtcgtcagtataaaccatttcatacaccgccagacgcaggatcgcgcggtctacgtttgcaatccggtcaagcttccaattgacgagatggccggaaatcatttcatcaagctgaacctgatgttcgatcactccgtacaccagctgttcaaagaaggcatctgttttttcaccatcaagcgcgtgctcaatggcctcgttcggtgcaatatcgctgacatcaatctgaaaaagtgcctgcaaagctttttctctagctgttcttcttttcattttctttctccttcagatccgctttatccgcttgtcgttaagcttaaagagatcataacatatttttttctcaatcgcatgtcgaaatttaggttttttcaccctaatgccgaatattttcacaaaccgtattaatttcattcggatttcacagcatgaagaaactcggctgccgtttgtaagccggctttcttcatgcctgaaatgacgggaaacgtataaaaaaccaaagggctgcccatccccttggtttttatacgctcattacatttcttcgtcgatttcgacttcttgggctttcgtgtcaaattgaatgccgacgatatgaatattgatttcattaatggtcagagacgtcatgtttaataaggtttggcggatattctcctgaacgcttgccgccactttcgggatcgagatcccgaattgaacgacgcaatagacgtcgatggtaatcccgtcatcggctaaatcgacctttacgcctttaccgtgattgattttgccgaagcgttctacgacgccggtggcgaaattgccgcgcatttcagcaactccttcaacttcggaagcggcgatgccggcaatgacttcaatgacctcaggagcaatttcaaccttgcctaaatgagcctcgtcatgatccattttaagcacactgttgtcttccattcaattcacctcccgcaaaaattatgagcccattacatcatatgtttctaaaaactttgtattaaactctccgctgacaaatgtttcgtgttcaagcagtttcagatggaacggaatcgtcgtttcaataccttcaatcacgaattcgctcagcgcgcgtttcatccgtgcgactgcctcatcacgcgttgttccgtatgtgatgactttagcaatcatactgtcatagtacggcgggatcgaatagccgggatatgcggctgaatccacgcgtacgccgagtccgcccggcggcaggtacatgttaattttaccgggtgaaggcatgaagtttttcgcaggattttcagcattgatgcggcattcaatcgcccagccgttaaattcaacgtcttcctgtctgagcgaaagctcctgtccggatgccactttgatctgttctttgatcagatccgttcccgtcaccatttctgtgacagggtgctctacttgaatacgcgtgttcatttccatgaagtagtagcgctgttctctgtagtcataaatgaattctactgtgccggctcccgtgtaaccgacggccttcgctgcttttaccgcagcttcgcccatctgctccctgatttcagaatcaagcgcaggtgacggtgactcttcaagaagtttttgcagacgtctttggatagaacagtcacgctctccgagatggatcgtgtttccgtaattatccgcaagcacctgaatttcaacatggcggaaatcttctatgtacttctcgatgtacacacccggatttccgaatgccgtagcggcttcctgctgggtaatctcaatgcctttgatcagttcttcttctgtgcgtgcgacccggatgccttttccgcctccgcccgcagtggcttttataatcacaggatacccaatttcacctgcaagcgaaaccgcttcttcggtattttttatgattccttttgaaccgggcacaatcggcacaccagccagctgcatcgtgtcgcgcgcgatatcttttgttcccatttttgaaatggcgtcagccgtagggccgacaaacgttacgttcaattcctcgcacagctcggcaaagtcggcgttttcagctaaaaacccgtatcccggatgaatcgcatccgtgccggtcagctttgcgacgctgacgatgttcgttacatttaaatagctttcttttgatgttttcggcccgatacaaaaagcctcatcggccatttggacatgcagggcgtctttatctgcctcagaataaacggctacagtttcaatgcccagctctttgcaggcccggatgattctgacggcgatttctcctcggttggcgatcaatagctttttaatcataatagcaggtctccttactcagcttttacaagaaatagaggttgtccgtattcgaccagctggccgttttcaactaacacttcaacgatttctccttttacttcggcttcaatctcgttaaagagtttcattgcttctacgatacaaacaactgtattttcgctcacttttgaaccttggtttacgtaagggccggcttccggcgatgaagaagcataaaacgttccgaccatcggagacgtaattttgtgcaggttttcgtcttgtttcggcgcttcctgaacaggagcggcttcatgcgcttccggttttgcagcctgcggagcaggtgcgtaagcggcgggaacggcttgagcttgtcccgttacattcactgccggcgcttcattttttttcagtttgaggcttacgccttcgatttcgtaaacgaattcgtcgatggaagattcatcgattctttttatcagttcatgaatttcgttgatttttaacatcagtttccactcctatgtataaaaaatagaaatttatgggttgctactaaaagtacatactatgtttatcttacaggagcgcttgtgtaaattcaacactgatctaaaatgacatcagaaaagcccgcagcgggtgcgggcggtggagatctcttattttgtcggttcaaacgtgacggcgacgtctttcatcgtcttgatttctttttccaccaggtcaatgatagcggaagcttttgcgtttgaatgtttgtcagacatgaccgtaatgttgattttgtctccttcagcatccacgagcgcatctttgtagccttgtgttttaatcagcgtttccagctgtttttccgtcccttcagcattgctcagcgccgtcattttatcgtaggcttcgcttttttcctttgcggtcgcatcatcgcttgaaacaatgctgtttaactgttccctttctttgcttcttgcgtcttcaagttccatgcggtatgcggtaaataagttttcatcagctgtttctgtagcgaccgatccgtctttgtccgatgcttcggctgatgtttctttatcctcttttgcgcctttagaatctttcgttccttttgttccgtcttctttatccgtgccgcttccgttcttatctttcgtttcaggagccggcgttttttcagttgccacttctccgctgcttttttcgcttttcatctgcacggcatttttgctttccggcgacataatataataaacacttaataccacgacgagactgagcattgttaaaagccaaaccgtttgttttttcagcatgatttatgaatcctccttgatttttttaggggcaaccgctacacggtagctcggaacatcaagcacccttgtgacggcatcaatgatggttttttttatttgaacgttgtccactccctgagcgacaacgagtacaccgcggatatcgggctttttcgtctggacgacgaccggggtttcctgatccccgtttcgaatcatgacaatttgttcttcagaggtttgatcggttacgcttcttttgccgccttctttatcggtttcttcggtggtggtgtcttttttcgttttatttttctcaaacactttcaaagatgttgcgtctacgttcacgacaattgatacatcctccacgccgataatcgtttcaaggatttctttcagctggttttcatagtctctttcataatcatcgatcgtgtttttggcgctgctgtctttcgatgccttaaaaacgggtgcgcttttttgcccgcttttgtcttccgttcggccggacatgacggtctgcgccgcttggtccttcccggttttctccggtgaagagaacagctggctcaccagcataaaagatactccgagcacaaacacgaacagaaagtaatgatattttgtcagttttggtttttctccgtctttcgcctgtccgatcatcagctgttttttgagtatggtccatagtccgtttttattcatggccgtttttctccccgccttccatataaaccgtaattttctcactgccgatttcccatatatccgcaagtttttctttgatgtctgcggcctcttttttttcggctgcgccttccggttcgtatttgcggtctgtgcggatgtcgatcggtgcgacggtttgcacggttttttcagaagatggggccatatacacgctgatcgtttttacatcttcttctgaacgaacctgttcttccgctgtaaggcggatgtcgtctattttgtattcgtcatgactgaacatctcctccgctttcttttttagttggacagccatttcttctaaaacatatgcgcggtttgatgcttgtatttcttttttttctgatttgatttgattttttatatcagcggattgagattgctcttgttttgtcaaataatcgaagatgatttccgggtctgttttgaaaagtttgaagatcgggttgagcatgacaatgattaacagcaggctgacaaccatcttggcgtatttttgcatactggagctgggcagcagcatgtcgatgacgatggcgaataagataaacaaaataatgcttgtcagccattctgttaaaaagctcatatccaatgggcctcctttatttcatcatcatggtgaggttgcctgctgtaataatgactgtaatactgaggaaaaacatgagagagacgatggcgagcgccgcgaaaatatacagcacgcttcggctgatgacgccgaggcacgtaatgacgggcccgcctccgagcggctgcagaatagcggccgcgagcttataaataaaagcgagcgagagcactttgatcgccggaaacgcggagatgcagatcaaaattccgactcctaggattcccacggtgttttttaataggagcgatgcgctgatgaccgtatccgtcgcatccgtaaacatccggccgagcacgggaataaaattgcctgtgataaattttgcagtcctgagcgtaatcccgtccgtcacggcagccgaagccccctgtacggagatgacgccgagaaacacggtgagaaatacggcaagcgcgccgatcgcgatatttctgagcagattggcaagctgcgtgactttatattgatccgtcatcgtgctgacgatgcttaaaatcgctgacaggaaaataagcggcatgacaatgttttgaatgagaaggccgctcgtattcatcagaaataaaataacggggtgaaaaaaagctgcggagacggctcccccggaagacgccaaaagcgcgagtaaaagcgggatgagcgcgagaatgaaacttgtcatcgtctggatcgcttcactggcataattgacggcaacatgaaagctgtttaaagcgagaataatcagcaccatgtagacgattgcataagccactttgctgacagtgctctgctgaaacgcattttgcaaaagctgcagaatgacacaaaaaatggtgagaagaatcaaagttcccagaagctttccgtttgcgagcacttcatgaaacaagtatgaaaataaagccttcagccatgcctccggcgagaacgttttttcaccgttaataaagtcgatgatgcttcccttttggctttcaggcagaagaccgccgtattctgtcatgatgtcgtcccaaaactttccgatgccttctgttttcagcgcttcggcctgctttttcgccacttcatcagcggattcttggtgaactgcggtttcctgcgacgcaccgtctgttccggcagcttgtacacattcagtctgaaaaaataagaggatgaacaaaaaagcccccgcccaccgaaagcgcttcattttttgtgcccccctttccattttattgatgatcaagaaggaataagtccgagaatcgtttcaataatgacggtgagtatcggcacggccattaccagtatcaaaatttttccggccagctctattttcgaagcaatcgctccctggcccgcatcctttgtcagctgcgcaccgaattcagcgatgtaggcgatgccgataatttttaaaatggtttccacatagaccatattgacatttgcattgacggctattttttctatcattctgataatgtcgtaaatctgatcgatgagatagagaaagatcacgcagccgctgaagacgacaatcataaacgcgaaagtcggtttctgttcttttacgatcagggagagaaatgtggcgatcaggcctaaacctacaatttgaacaatctcaatctgtaagcccccctatccttggaatagaaacacagctttgatctttttgaacaggtcatcgacaatcgtcgccaccataaataaaatatagataaagccaagcagcgtcacccattgggcgtattctttttttcccatttggtcaagtatggtgtgcagaaacgcaaccacgataccgactccggcgatttgaaaaatgacatttacgtcgactcccattttatgtttgctcccctcatgtttacatcaatagaagaatgagtaacagtccggctaaaaatcctaagcttttcaccattttttcatttttcgcctgcgcccgtccggcatccgcttccgccgcttccaaatgtgtaagcgcaagcttgatatgtttctgctgagaaacacggtcatggagcccgagcgtctctccgaattgcttcagcacatcgtattcgctttttttcatcgccatggagggccagttatgtttcaagctctgttcccaggccgttttggcggaatcgcttccctgctcaagcctcctgctgaaagcttgaaacaatgacgatacaggcttggaaagctgtgcggcgatttgtcccgaagctatgtgcagcggcgtatgcccgaacatgatttccgcttcaagcgattgcagcgccgcgcgcagctgacggatctgtctcggcctttcaatatacattttggcgatctcaaatcccgtccatgtcgtcgctgtcagaatgaacacggcacccaaaagcttcagcatgtcatcacgctttcagcatgcggaacaggtttcccgtcctttccgtacatcctgctgatcgttcccggaccgcggcgtcttgacagttcaacataccggtcaaacacgttttcctcccaaagcattttcagcgacggcctcttgaccaagtctttcatattccatccgtgcgcagagacgataacggatacgcccgcatggagcgcctccagcagcgcttgtgagtcttccattctcccgatttcatccacaattatgacatcaggactcatagaacggatcatcatcatcagcccttccgccttcggacaggcatcaaggacatcgactctgcggccgaaactgtgctggggaatgccccgcaggcagccggcaatttccgaccgttcatctacgatacctgtcttttttgccggaatgcgttttgatccggtgctggaaagccgggccaaatcacgaagcaaggtcgttttccccgtttgcggaggaccgatgatcagcgtgttcagccagttttctttccataagaaaggaatgagcggttctgcgatccccagcttctcccgggcgattcggatattaaaagaagtaatatcccggagtcctttgacggctccgttttcgacgatgactcttccggccagccccacacggtggcctcctctgattgtgatgtatccttttttcagctcttcttccagcgtgtacatactatagttgctgagccggctgaggatcagctgtgcgtcgccggccgtacacacatatgacaaatacaaaggttgtcctttttggatcagttcaaccggcctgtcgacccggattctgatttcttctgtatcccgcctcgcttcttcgggcacggcggagatggcatctctcaataattcagggagaacctctgtaatttcattcaatagagtcccctcctttttaccgattggcttctttaaaatgtatgatccgggacagactttatgacaccccggccctctatttatgcacaccggccaaaatcagcaccacacccgcaaaaatcaatattaattttgcatatgagagctgtccggcaatctgataaatgccgatcgtcattgtgatgataaagatcagagggccgacgattgccaaaatactattcaccacaaccgcttttctgatgtcgtttgtcaaaagcatgataatagcggcagataattcaatgagcgaggacaaaactcgtaaaccggccatcgttaaaacagtagaattgattgaaccgaacaaaaatttcattgcaatcccccaacttcaagcattttgttacactatatgctctagctcacggaagtagtctcactattttcatatagaagaaagattctgaggcagaacgcaaaaaaaagcctgccccgtaaaaggagcagactccgaatttctttaactacgctcttgacacgtaagaaccgtctgatgtatttacaaccagcgtatcgccttcgttcacgaagaacggtacgtttacgacaaggcctgtttccgttttggcaggtttcgtgccgcctgacgccgtgtcgcctttaattcccggctctgtttcaacaactttcagttcaactgtgttcggcagttcaataccgagcgtttcagactgatacatcatgatatgcacagacatattttccagaaggtatttcaattcttcttcgatttggttttcgttcaattcaagctgttcatatgagcttgtatccatgaacacgtgctgatcgccgttggcataaagatactgcatcgtttttgtttcgatttgagctttcgcgactttttcacctgcacggaatgttttctcctgaatagcgcccgtgcgcaggttacgcaatttagaacggacaaatgccgctccttttcccggttttacgtgctgaaagtcaacgacgcgccaaatgccgccgtctacttcaatcgttagtcctgtacgaaaatcgttaactgaaatcatgtttgatgtcctcctatactccgatcacaaaataattaattctttaggggaatgcgtaattgtccggttgccgtcctcagtgatgatgatatcatcttcgattcttgcgcccccgacttccggtatgtatatgcccggctcaaccgttaccgccatgcccggctcaagaacggccgatgacctgaaagacagccccggtgattcatggacttccattccgaacccgtgtcctgtcgaatggccgaaatactgtccgtagccttttgcggtgatatgatccctcgtcagggcatccgcttcttttcccgtcatgccgggtttaatatgcaggacaccaagcgcttgggcatcgtatacgacctgataaatctctttcagtttatcacttggctctccgaccgcgacggtgcgtgtgatatcagaacaatagcctttataataagcgccgaaatcgagcgtgaccaagtctcccttttcaatcaatttgccgcttgccactccgtggggaaggctggatctgactcccgaggcgacgatcatatcaaaggaagagccgtctgctccttgacgtctcatataaaattcaagctcgtttgcaactgaaatctctgagatgcccggtttgataaacgtcagaatatgttcaaacgcatcatccgcaatcttcgcagcttcctctaatatcttaatctcttcacttgacttaatcaagcgcaacttttcaacggaatccgcgacgggaaccatctccgcttcctgcagcaccgcttggtaggatgcatatgttccgtacgtcatgctgttttgctcgaagccgagttttttaatgccgtactcaagaatcgtatccgcagccgtttggattaagcttccgccgtgctcgataatgtcaaaacccttcacttgcgtcttcgcctgctcggtgtaacggaaatccgtgataaatgccgcacgttctttcgatatgaccgcaaggcctgacgaacccgtaaatcccgtcatgtactgcagattggcggagcttgtcaccaacattccgtctatatccagctgaccgaaaagatttcgcaatttctcaagtttcattccctttctcctcctcgccgattcttgactgccgcctgacaacgcgggagcatccctgcccggttttcagcataaaaaatgttcacttctcgtgaacattttaccataccggacagggattatacacttattcacttgttgccgagcgcccttgcaagcttgtctgacgtaagttcattgtagttgaaggaaattgagtagccgacaaacaaaccgtacagaatgtaaaggcaaagcgtcgtcacgattgtatctgatttcaattcagtgacggatttcacatcttcgaaaatcggattgaataagaaaaaaaccgcacaccataaaatgacgccgtacaccatccccggccacatggttttaaaacgcttcaggcagacgaaataaataaacgccccggcaattgaaatgaatccgatgacaacgatgctgaccatcgtgcccagccattgttttttccattctccgatcataaacggctgaagaatcatgttggggctgatctctgaaaaatgaaagacatacccgagatagccgatcaaactccaaaatacaccgccggcaaatccgataccgcaaattctgccggtaaatgaaacaggctgctgatcatcatcctgcttctttttttcttcctgttctgaatgtttttcgcttgtcatcatggcacctccagtcatagactgcccaaaaattgaaaagtcataaaaagctgcgccatattttcattcaatgagtaaaatctaaagaaacggggtatactgcatgtagaaaaagcattgattttccggctgtctaactagaggtttaccgcggtttcctgtacaatagagtgaaaggaaatggttagtaaatcctaagaaaacaggcaggttgataaacaatgtccaaacaaaaaacgccccctgcatacggcgggcaggctgtcgttgaaggggtaatgttcggcggcagaaaaaattatgttaccgccatccgcaggaatgacggaagcattgattttttcaagcttccgagagtgccgaacgccaagctttcggctttaaaaaagattccttttttgcggggaattgtcgccatcattgaggcgagcgccaacggcacaaagcatttaaacttttccagcgaacgttacgggcttgatcctcaggatgacgccaagctggagcaggaagagaagaagggttccggcttatcgatgtttttcagcctggcggtgatcggcgttctgtcgtttttgttcagcaaattcgtttttacgctcgtcccggtcttcttagcggagcttgtaaggcccgtattttcctcagacgccgcgcagatcggaatcgaaagtctgtttaagctgattctgcttctcggctacatttattttttatcaatgacgccgttaattaaaagagtgtttcaatatcatggagccgaacataaggtcataaactgttatgaacagaatttgccaattacaatagaaaatgttcagaaacagtcacggcttcattaccgttgcggttcaagctttattttatttacgatcattgtcggcatgttcgtctatttactcgttccgacagatccgctttgggtgcggattttagacaggattgcgcttataccggtcgttctcggcatctcctttgaagtgctccagctgacgaacagagtacggaatatccccgttttgaaagtgctcggttatcccggcctgtggctgcagcttttaacgacaaaggaaccggcggatgaccaggtcgaggttgccatagaaagctttaacgagcttctcagactggaagacatttcagaacagagcgaaaatccgtctcacaacgtaatctgaaccgttaccgttattattttggaggtgggcagttatgaatcatcgtgtacaacctttttttgctgtattgatagcgcttggcgcattcggtttcatttatgcggcggtaaccaaccccgggcagatgatttcaagagcaatcaccgttattatcgcaggcattattatttattttatcgtgaggacggtcctgaaccgacgcaccggccgtgacggaaccgctttcaaaaaagcggccagacaatcgcggctccgaatgaaggagcaaaaagcgaagcaccgcgccggacacagaggccgggtcagccatttgcggagcgtgccgagcagcagcagaccgaagccgatgattcttaagaaaaaaagccagacccagcttaccgtcatagaaggcaaaaagaataaaaagaaaaacagagcgcttttttaatagctccattgcttcaaaaattgctctgttctgctttttcctagctcaatgagagctagttttttttgcggtgtgagatgaaactccgtcgccatcacatgttccaccggaataaaaataatattctgttcgtactttgtcgcgatatgcctggcatcatgagcgtctttcatcgtttcaaacaaagccccgaacagctcaaaagcgttgcggattgattttttcgggcgctctttttcgttgggcgaaagcgaaattccgatgaccggccgtttgcgttcttttgaatacagccaaatcgggaaattgcttaacacgccgccgtcaacgaccgttgaggtgcctttttcggtcttcagttttatcggttcaaaaaaataaggaatgctgcagctcattctgacggctctggcaaccgggaacatctccggatttaatccgtagcggggaagatcgtcaggaagcacgatcatcgttccgttcgtcagatctgaagcgatgagacggagcgagccttttttcaaatcgccgaacgcgatgatgcccttcgcttttaatttatccgcaatccacttttccagcatatcgcctctgtatagtccgaggcgccaatatatcgacacccactgcaggattttcagcgggaggaatgagtatctctgatcaagcaattgccttccgtccacctcatctatgatggaatgaacctctctgctcgtatagcccgcagcgataaatgcggcaataatcgcgccggcgcttgttccggcgagcctttcaaagcgaaagcccttttcttccagcgcttcataagcgccggcaagcgccaccccttttatccccccgcccgaaaatacgccgtcaatctgcatagcgcgccctctcccttccatctcaaggtgtattattattttaagaaacggctgggcgaaatagaccaaagaatgaagacattaaaaaaagggcgccccatttcgggctgccctttattcaccgggattttcggtttttttctgtacggatttcaattcttttttccggctttcgtcatcttcaaaatactgaacgaggtcgccgatgcggtcaatgctgttccagctcagatgatgttcgattccttcaacatcattgtaaatcttctcttcatcaacaccaatgattcttaaaaactgctcaagcaattcgtgtctgtatacgagccgtttgccgatctttttgccttttgacgtcaatacgagcccgcgatatttttcataaatcaaatactcgtctttatctagtttttgaaccattttcgttacagaggaggggtggactgccaaagcttccgcgatatcagaaacccgtgcatatcctttttcttctatcagcatataaatctgttcaatataatcttccatacttggtgttgtcataagtaaccctcccaaaaagcaccttaactttataaaccattacaagtttacactaacggtcatgaaaaaacaaggatgcttccggtctgtcaagccttatcagcgcttataattccattcatcagacgcgtatttcgtctcagccagctcattgacaaatgcaagctcttcagacgtgagtgtgtaaggctcaagatgaatgttcagcccttcctcaaaaccggctttaaaagcgattctggcctcatccatcgttacccgtttcggcgttaaggcgttgatggctaccgctttgtttttgaaattccgctgcatgcgctcacggactctgtcgctcggatataaaaacagatcaaacagcttatcctcatcaatgtcaagcaggatggaaccgtgctgaagaatgacgcctttttggcgtgtctgtgcgcttccggcaactttccgtccttcgacgaccagctcataccacgaaggggcatcaaagcagacggacgagcgcggatttttcaagctttctttttctttctccgttcgcggaatcgcaaagcaggcatcaagtccaaggtttctgaatccctgcagaataccttctgaaatcacccggtacgcctctgtcaccgtggccggcatttccgggtgatcctctgaaacgattacgctgtatgtcaattctttatcatgcagaacaccccgtccgcctgtcggtcttctgacaaacccgaggccgtgtttatgtactgcgtcaaagttaatttccttcttaatattttgaaaatacccgacagacaaagttgccggattccagccgtaaaaacggatcaccggaggaatttttttttggctgtgccaatataaaagcgcttcatccagcgccatgttaaatgccgggctttcattccctgagtcaataaaccgccatgtttctttttccatacactgaacccttctttatcgttttaataaaaccagtttaacaaactgccttgaaaatgaaaaatatttcgtttcattaaggatgacaatcgcttcatgctttactataatagtatttgtcccaaaacgtccggtaagccttgttttcaggaagcagggttttgattttataagctaaaggagtagaattgcattgtctaatatgattgctttaattattgttgcggcgtttatcgtttatatgatcgtttcgtacttttaccagcagcgtttaatgaaaacacttacggaagaggaattccgcgcgggctacagaaaagcgcagctgattgacgtccgtgaaccgaatgaatttgaaggcggtcatattctcggcgcgcgcaacattccgctgtcacagctgaaacagcgcaaaagtgaaatccgtcctgataaacccgtttatctgtactgccaaaacaatgtccgcagcggacgcgcggcacagacgctccgcaaacacggctgcaaagatatttacaacctgaaaggcggatttaaaaaatggggcggaaaaattaaagcaaaaaactaatcatgaaaaaagagctgtccgttttatacggaagctctttttttataccgtgtcagcggctgacgtcaggtgtacgttcgtattttaaaaccggctttctagccgccttggtttcatccattcttttgacaactgttgtatgcggcgcctcctgaacgatttcaggcgattcctccgcttcccgcgcaatttgaatcatggcatctataaacgcatcaagcgtttccttcgattccgtttccgtcggttcgatcatgatgctttcttcaacattgagaggaaaatacacagtcggcggatgatagccgaaatccaaaagccgtttggcaatatcaagcgttcttacgccgagctttttctgccttcttcccgataacacaaattcatgcttgcaatgacggtcaaacgggagatcataataaggcgcgagtcttctcatcatataatttgcatttaaaaccgcgttttcggtcacagcttttaagccgtcaggccccatggaacggatatacgtgtaggctctgacattaatgccgaagttgccgtaataaggttttacgcgcccgatcgactgcggccggtcatagtcaaaagtcaaacggccctcttttttcgtgagaacgggtttcggcagatacggaatgaattcttttttcactccgactggccctgagcccggtcctcccccgccgtgcggcccggtaaatgttttatgcagattaaggtgaacgacgtcaaatcccatatctcccggtcttgctttacttaaaacggcatttaaattcgctccgtcataataaagctttccgccggcctgatggacgatttcagccatttccgtaatgttttcttcaaataacccgagggtgttcggattcgtcagcatcagcgccgctgtttcttcgtttaccgctcttttcaaatcttcaatgtcaaccagcccgtgctcatttgacttaacggtaatcgtttcaaaaccggcgaccgtggcggatgccggattcgtaccgtgggctgaatcagggacaatcaccttcgtccgtccgaagtctccccgcgcttcgtggtaggcgcggatcatcatcaggccggtccattcgccgtgagcgcccgccgcaggctgtagcgtcacctcgtccatgcccgtaatctcctccaagtgtccgcttaaatcgtataaaagctcaagcgccccctgaaccgtgtcctcgtcctgaagcggatgaatagcggagaaacctgcgaaccgggcaattttttcatttaatttcggattgtatttcatcgtacaggagccgagcggataaaagcctgaatcaactccgtggtttctcttagaaagagcggtataatgccgcataatatcaagctctgatacttccggcagctttgcgtcttcatcgcggatatagtcaccgggaagaaggctttcaagctctgtttccggcacatcaagctccggaaggctgtaaccgacacgcccttcgcgggacatttcaaaaataagcgcctgatcttgattattcatgttgatcccccaatcccgcaataagcgaatcgatctcttctttcgttctcagctctgtgacggcaatcagcatatgctgatccagttccggatacgcaagacctaagtcatatccgccgatgatgccgtcttgcaggagccgccggtttgcttccttgacgggaagattcagcctgacggcaaattcattaaatatcgggccgtcaaatgctacgtgcaagccggctttttccgcttggcgtctcgcgtaatcagctttcaatatattttggcgggccatgtctttgacgccgttttttccgagcgccgtcatcgcgactgaagccgctaaagcattcagcgcctgatttgaacaaatgttagacgtggctttgtctcttctgatatgctgctcgcgcgcctgaagggtgagaacaaaacctcttcgcccgttttcatcctctgtttggccgacaagccggcccggcacctttctcatcagttttttcgttactgcaaaatagccgcagtgcgggccgccgaacgccgcaggtatgccgaaaggctgcgcgtctccgacgacaatatcagctccgtatgccccgggcggtgtcaaaataccgagcgcgagcgggtttgaagaaacaatcagctggctgtttcctttatgtgcgagcggctcaatgtcctttaacggctcgatttgtccgaagaagttcggatactgaacgatcacggcggccgtctcatcacaaacggcatgttccaatgcttcaagatctgtgacgccgtttttcgcgggcacctctacaacctcaatatattggccctttgcgtatgttttcaaaacatcccgtgattccggatgaacggctgcggaaataatgatttttttctttttcgtatgtcccgacgcaagcatcgccgcttccgcaagcgccgttcccccgtcgtacatagaggagtttgcgatatccattcccgttaattcacagatcatcgtttgaaattcaaaaatcgcctgcagctccccttgtgaaatttcaggctgataaggcgtatatgccgtgtaaaactctgatcgggatatcacatgatcgacgatgaccggctggtagtgatcgtacactcctgcgcccagaaaagacgcatatgtaacagcgtccttatttttcgccgcaagctttgtcagctctctcgtcagctccgtttcagattttgcttttttaatttggtagtctttttgaaacctcacatcttccggaatatcggcaaacagttcatcaattgtttctgcgccgatggctttcagcatttcttttttatcctgttctgtcgcgggcaaatatcgatgcttcatatgactctcctttttcagctctgttttggacgtttataaaacggtgtgcggactatcttcgcttttaccgtttttttacggatttccacttctacttccgttccgacttcactgaattccgttttgattaaggcaaggccgatatttttctttaaagtcggagattgcgtgcctgtcgtgacttccccgatcggaacaccgtcttttttcacggcgtacccgtgtctcggaatccctttttcaatcatctcaagtccgaccagctttcgcggggctcctttttctttctgttcacgcaatacagatttcccgaaaaaatcggaatctttcttgtgtttcacggcaaatccgattccggcttcaatcggtgtaatatctttcgtcaattcctgaccgtataaagcaagcttcgcttcaaatctcagcgtatcacgggcgccgaggccgcacggaacgaggccttcatgctctcccgctgcaagtatctccttaaatagatgaaccgcatcttcattgcggcaatataactcaaacccgtcttcaccggtatagcctgttcttgaaagcaggacttggcgtccggcaacgtccgcctcgtcaataaatgcaaacggctttaaggaggacagatcacattcagtcagcttcgcaagaaccgactgagcattcggcccctgaacggcaagcagtgaaatcccgtcagactgattcgtcagcgtgacatctccttccgcatgttctgtcagccaggcgatgtctttttcaatattagacgcgtttatcacgagcagatagcagctctcgcttttctgatagatcagcaaatcatcgaccgtaccgccgtcaggatagcacatggcggtataaagcgcgtttcccggctttaaatcggcaacgtcatttgtcatcattttttgcagaaaagacagggcgtctttaccggatacttcaacttcccccatatgagacacatcaaacaggcccgcttttgtgcggacggcttcatgctcctctttaatagaagaaaattgaaccggcagctcccatcctccaaaatcaatcgtttttccgccgtattctttatacacatcataaagcggtgttcgtttcagcatcatcttcccccttcagtcattggcgcttgtaaaaacatataaaaaaggacagagaaacacctcatgaaaatgaaggtttctctgtcccggcacctgaaagtttactttatgaacatatcataaagacgtcccctttggtggcctgcttcttctaagtgcagacactctccagagttgcgtcgagcaagagttcttttgcctgagagattcactccgcagtttgctccttcggcgcccggacgcccatctttcgtccgagtctctccccttgctgtcattcgctcatatttaccaattttatggacatactaaagcaatatcttttagtgaaatcattacttatatcctaccaccctcatttacgtccggcaacaaaaattatgataaatcagttttttaaaagaaaggcggttttgttacatatgacagcagagatcatatttgatgcaaactggccgggagagttttctgagcggctgaaaacggacggtccctggtcaaattgggagctgtacaaactgtcggctgaagtccagcagacccttgccattcctgaatttgaagggttgagagctcctttatacctgcccgatttcactccgcttccccatcagcttgaggtcgcgcagaaagtcgttgaaaaaatgaacggcaaggcgattttggctgatgaagtggggctcggaaaaacggtggaagcgggcctgattttaaaagaatatatgattcgcgggctggccaaaaaaatcctgattcttgtgccggcatcactcgtttcccagtgggtgaaagagcttcaggagaagtttttaatacccgctgttgaacagaagaaaagctatgtgtgggaacagtgcgatatcgtcgtttcttctattgatacggccaaacgctcccctcacaaagacattgtcctttctattccgtatgatctcgtcattattgacgaggcgcacaagctcaaaaacagcaaaacgaaaaattatgaatttgcgagaagtcttgtgaagaaatactgcctgcttctgacggcgacgccgattcaaaaccggatcgaagaaatcttcaatttagtgtcactgttaaagcccggccatttaggaaatgaaagcggatttcaagaaaccttcaatcagaaggacgggattgacgctcatgagcatttgaaagaactcgtcaataaggtgatgatccgcaacacgcggagcgacaccggccttacatggacgaagcgccacgtggaaacagtgccgatcaccttttcaccgacggaacaggcgctttacgatgacattgccgcactgaaaaacggcacggaaaagcccgcaagcgcattttccattatgacgctgcaaagagagtgctgttcaagcagggaagccgtgtatatgacgctcaaaaaaatgcttgaccaaaaagacaaacaagcgcccgcattcgatgaacagacgatcgctaatttaatggaccgcatcaatcaagtcacgcaaaactcaaaagcgattcaagttgttgacttgatccaaaagattaatgataaagtcattatttttactgaatacagggcgacacagatttacctgcaatggttccttcagcagaacggcataagctccgttccgttcagaggcggatttaaacgcggaaaaaaagactggatgaaggatcttttccgcggcaaagtgcaggtgctgatcgctacagaagccggaggcgaagggatcaacctgcaattctgcaaccatattatcaattatgacctcccgtggaacccgatgcggcttgaacaaagaatcggaaggattcacagactcggtcaggaaagagatgtccatatctacaatatggcgacaaaacatacggtggaagagcatatcttaaaacttctgtatgacaaaattcatttatttgaaaatgtcgtcggagaattagatgacattttaacaaaaatcaaagtgagcaattttgaagaccatttgcatgatattttatgccattcgctgacagaggaggaaatgagaatcaaaatggacaatctcacctcttttctgtcgtacggtacggaaaagcccgccagaaaaaaaggctcttaaaaaggaggaagcgcgacatgagacagcaggaggttcaccaatttttactgcgcttttttgaagcgaaccactgcccgattacagaacacgggccgggttttatgacggttcagttgacggtcgagatggacaaacaaattatgaaccgcccgttttattggcattggcgtgaaaaaacgggcggcgaaccgaacccgatgaagattacgttcatcactgataaagaaacggctccggaggatatggacggcgagtttatttactttggagccccgcgcctctttcaaatctttcaagcagttaaacaaaatgggagatttacaagaatatatgagaaaattgtatcagccggagccagagtgccgcttcagccctggcttggattaaatgtagtgatttcataccaatccgacatgaaaaaagacagacttttgtctttaggcctgcatcttgtttctggaacaattatagaagggtttcagcagaagcttgcaccgcttccgctgacctcgcaaatatcagactattgctttaccatatcgccgatgattaagccggaaagcgggattaaaaggatggagcattacttaaaagacgctgccgccaaagagccgtcagactgggctgacagcgcgatcgccagatggaaaaaggacctcaggctgctcgatcagttttatgagcagacagaagaaaaacctgaggaataccatttggaaaaacaagcgctgaaagccttatatcagccgaaaattcacattcagattgaaaacggcggtttatttttcctgcaaagtaatttttctggataagcgttatccattcgacacctttcccgttttttctggaaattctatattataataaaagtatatagaaaaaatttctggcgtttcgcatgcgatgaatcacttccagacatgtaaagataaggtcatgggcggattggctgaaatacataaacaagtattttaggaggagaaaatgcatgaaaaatgcaaaaatggaattttcgcaattagataaggaatgggttgagctgatattagaagcccaaaaagcaaatatcagcctagaagaaatacgcaaatacctgctttcgcataaaaagtcttctcaacatatccaggcagccagaagtcataccgtaaatcctttctgaatgtgctataatatcacaaggaaggtgatgacattgattggccagcgtattaaacaataccgaaaagaaaaaggctactcactatcagaactagctgaaaaagctggggtagcgaagtcttatttaagctcaatagaacgaaatttacagacgaacccctccattcaatttctcgaaaaagtctccgctgttctggacgtctcggttcatactttacttgatgaaaaacatgaaaccgaatacgatggtcaattagatagtgaatgggagaaattagttcgcgatgcgatgacatccggggtatcaaaaaaacaatttcgtgaatttttagattatcaaaaatggagaaaagcgcaaaaagaggagtagtgccgccatatgtgcacaactcctcttttaactgtccgactttcggattagtttttatcctcactgtgagccttttcattttctttgacgtaaccgtctttatccgtatgatctttcttaatggtcaagccgttccattgcgtggcttcaaaagagaattgaagagaaatcgcattgccttggaacttgttttgcacacttaatccgtccgcagtttttgcggtgtcatttttaaattggatttccattctcacctggtcataatcagcaggcgttttcggaactccgtcgtactcaggagctgttttgccgttaatggttgccacattgacttttccgctctcgctcaggaatttcggatcaatgtgcttgctgatcgcttcggcagctgctttatcctgctttgttgacattaagtataagtctttcaggctggccgcctttaaaatgatatttttaggatagccgttgcccccttctttaccgactgtcagaaccgtaatttcaaactggctgaggaaatcctccgcagattcattgcctttctttgctcctttaaagtcagtaaaattcaaagccatcagcacttctttaatggcaagtgaaccgttgtttctgaattcaaaatctttcgtcaatttatcacctggttttaagtttgacaaattgacattggctgattgttctttagccgataaatcaagtgttcctgacgcaaatgtagcgtccgtcgacttcacatcattaaatgcggcccatgtgcctcctcctactaatgctaaaccgagtgcggcagaggcaacgcccaagcttaatttctttttcatacccatgtttgtactccccttactttttattttttgttatcaaatcctgtcgccaggttgcaaccgtattcatgtggagatggttctctttttcgcatgttcttccagcgctttcgttttccgctcaatatcgcggagggcgctgacgatgactgttattgagtaaatcaaaagcatgacgccgggaacgattaacagaatcgccgttccgatcggctggcttgccaaatgtatgacatatcccgcatacggaagctgatatcccgtatactgggccgccactttttcagcttgaacgggggcggcatccggggcggcattatggtccccttttgtctcaaacagcaggttcccgtccttttttgtgatcccgattattctgtgtgtgacggctgttccgtcatcttgcgtaaaggtgatcacatcccctttttttaagtcatttacgtcagaaattttctttaccgctatgagcgaacccgtcttaaattccgggtccattgaacccgacagcacggatttcagcgtatagccgaagatggccggctcacccccggaagcccgggtcgaaatcaccgttaacgtcagcacaataatcaggctgaagatgacggcatacaaaatattactgatcagtttcagcgtttttttcatgttcttccccgctttcttttaccggctcagccggctctttctccgttttcttcagatcggaaacggttgcctgttcccggcatttgacgagtttcatcggttttgaccactcaaattgttcttcgtccgccggatacccttcaggcttgtaaatcttgaatgcgtatatgcccggctgcaaagaccgctttgactcaattttataaatcgttttgctttttttatcagtaataagccctttatccacaacattgccgtttcgtaaaggctgctgctgagaagtgattttatggagctcccatttccagtcagaaacagtccgctcttttcccttattctccagctcggcatagagttgaagcggcgcacacacggtgcctgacgtatcagtttgatttgttatatgtaaatcactctgatcccagcgttcgtcataacggcaatcgtcatccgtatattgaaaatctccgcacgtttgaaccgggagactgaagcttttcacatcattgaaggaggaacttgtatcacctgtgaactgagcacatatcgtcacggacaggcaaaaaatgaacgaaagccgtaaaaatagcatcatccgccatctcaccttgccctttttttccattcgcaacaatcggaacatgccttaccccctgtaaaactgttaataaatatgacaaccgttctctttaaagaacttcatgaacaaagtataatcaaggattatcgtcttgaaaaatgtcaaaatcggtcaatttgttcgtttttgagaatggtatctttcaaaaacatcgttttgcttcaaattacacacctttttggaattttttctaataaaacgtgagaaaataacgaggtgcctagcacaaaatggaaagtatatacagcgaaaggacgaagaatgatgatcacacaaagtctgatttgcctttctcttcttgttttcggggtttcaggaacagctcaggcggaaacggtgccttattatgctgttcaccataaatcaaaatgggaaaagttagcagaaaaagaagctaaaaaaagatatccgctcgcccaaacgttatttattcaaaaggtgtgggaccggaaaagaacggacgaagcagtcaaacaataccacttgacattgcgggatggcgcaaaagaatttggtgtgtttgttacgatttcttttaatccctacagccaaaaggtaaataaaattgccgtcattgaggaataccaataaggccctcctgatacaggaggaccttatgtgtgattcgctttattttttccgctgcatccacagcttaaaactgtacggcaatattccgaaccagtgctgagaagccggcactttcttttctttccgcacttcttttcgctctctccgttcctgtttcggcgtatcgaaatatttaacgaattgctcagtcatatattttacataatcatttgttttcacggctctcacctcatagtgctgtctttactatgaagtgttgtcccgccgcctcttttttatacttccgtccattgaatcagctgtttcttcttctgatcgaacaaaaggtgagcctcccgtctcgtgcctgacactgtttcggcctgaattgtaacctgaaccgtttcccggcgattactcccggtgatgcggaaggaaacagttccgtacggaaaacgctgtgtaccagtttggaccttttgtccctgtgtcatatggcggcttgacagcagcgcgccgttttggagcagattctctccgatccagtactccccggcctctttcgcaaatgtttttcgggtgatgaaatcagatgaagtatagctgatgacaagtaaaactgcggcagaaacaaacagaaccgcgggatagataaaaccgtcagatttgtacatttaatcaccttttaaagagctgtaaaccggaatgaccgcctgattctttttacctgtaacgcttgagatctctaataagagcaggccgtttttcacatcagccgttaatgatgccgcgttttgcaggatcggcacgtggccttttccgtttactcttttccttatcatcttatgataaatttcaaaacgcacttcttcgccccctgttttccggcatgctaacgccaatccgccgtccgccggcttcacagtctcagcctgtttacattcgttcatgatctgctgaacggcaatttgatgctcccggctgtctaatccgccgttatcggtccggtttgataaaaacagatgtaaaatcgggcccagggtgcctgataggaaaagacagactgccaaggagaacaaaacattaagaagcgtaaagccagtctgttttgagaatgctgaggcacatttctttttcgccgcggtcagccgcacacactttgtaatactcaccatcccccttccacttcacaccgggagacggcggcttttttccggtcatcatataagtgctgatatgtttctgaagaagctgatacgcttcctggcgatcttctattttcagaccatctgtcagcatgcctgtccagaccggaatgatagacgtcataaggaacagccaaatggccattgctgatagtgtttcaatagtagagaaccctttatttccgtttagcatggacatttccgctccctaagtaaactgtgatctcataggtgaacccggcgctcttcaatcgaatctttcctcccgaattcggatggcctttttcgttaaattcaaggctctccggtaaagtcacaagtgtaatgtgaagcgaatcaaaagaacgctcgacaatccttccggctgactgcagtttgtatttatgctctcttggaagaaaagtgatttttgttcttttatgttctgcgatagccgtttcctgcgcaagctgaatatctttttgaagctgttctgttttttgccgcacggcaaggtgggtgcagaccggcggaaccgtcgtgaacaaaaccgtcagcaggacggacgccaggcttaacacaatcaggctttcaagaagggtaaacccgttttctgtccgcctgttattgttcaactgtaacttctccgccactaattaagatctgtttaccattcgggcaggctgtattctttttgatatacccctctgattgtaaatcgttcatatccggcattttaccttcatggtcgatttcgtacgccgtcacttgggctttcaccatattctgcagtccttcacagcctttatgctgaatgctttgattatgttttgtaacgttaggaatggtgattaaaagcagaatggaaacgataaataaaacgatcagcatttcaattaaagtaaacccatcttgatttttcagacgaagcactcccttacatttggttcatcatctggtacatcggcatcagcattgacatgtagacaattaaaatcataccggccacaacaccgtaaatgacaggctggagaatgccggtatacttcgccgcgttttgttcaagacgctccatcataaactggctgtacgtataaagttcgcggtgaagcaggccgtttgcctgtccgtggctgactgcagccgcaagatctttttcataacacggatgcccggaaagagcggattctatggtttctccggctttcagacgtgtaatgagcatctctgcttcttcacgataaaaaggcagaaaagattgttctttaaaagctgttaagctgtcatagatagaaaggccggatttcagaagactgctgagctgtaaagagaaaaagtagctgttaaaaagaacggccgcttttcccaagaggggtattttcacaacaatgagcattttatcttgcggggattttttcttacataagaaccaaacgtacaaaaacaagcagaaagcggcggacagcgccagtgcgcaggcttcatgaaaatgccgaaaaaatgcaaagatgaaagcagtcgcaccggatgtattcatattcattgattgataaatcccagaaaactgcggaataattaaactttgcaggatataaaacatgacacagacggaagaaattaaaaacatcggataccggagcatttttttgatttgattcgtctgcatgagctttctctgtaacaaatcgccgctttgtttcatcgcccccggcaattctccgtgtttctccgcgaaatagcagatagagacggcttctttatgaaaagacagtgcctcaagcacttcgtaaaacgcatcaccttccctcagcctgcggattccgtccgtcagctctgcaagctgacgtttatgcagctggagtttcagcagtctgagcccttcaatcagactgtatcctttttccgtcatttcaccgagccttttcaaaaaagccgcttgatccttcaacggccaggttcgtttaatccgcttcatgatacacccaccgatcgtaattgtcggttgtgacatagccgagcgcgattccttttctgatcagcctgcggagcgtctgatattgaaaattggcgtgctctccctttgcttcctgaaagcattgggtgaggtttttcccgtagagcagttcataaatgcccgcacggcgggtctgcctgtacatccggcagtacacggaacagttttcctctttgcagaacggacatgttaaatcaaccagacgctgagcggcaatggcaatgacggtttgttcaatttctgtcatgttcaccccaaactccagcagcctgtatatggcgcccttagcatctcttgtatgcaggcttgaaagaacgaggtgtcccgtcatggccgcgcggactgcgatttcagccgtttcggcatctctgatttcccctaagatgatcatatcgggatcatgtcttaaaatcgcttttaaaccggcggaatatgtgactccggctttttcattcacctgaacttgcaacacatcctcatctcttgtttctacggggtcttcaagcgtgacaatccgccggttgaaatgccgttttgcatagttgacaagcgagtaaagagtggtcgtttttccagagccggtcgggccggtaaacagaagcaggccgtgtgaatgcttcagaaaggacaatagtgcggcgcccgccccccgaaataaggacagtttatccagagggggaatctgccgcttaggcaaaagcctgatgacaagactttcatcattcattgtcggcaaggttgacattctcaaatgaacggtttccgtcggaagcggcagagacaatgaaccgttttgcggcttacgtctttctcctatatccatggccgataaaaacttgaaatgagaaataagccttacgcattcctctttttttaagactctttttttcacaagagcatggccgatgcgaaaatgaatgaaagcatccttttctctcggcacaatgtgtatatctgaagcccttgccgtataggcctcgtttatgatgttcctgctgtatgtttcaatatttttcacaagacttccctccttccgcacgtattgtaaatcagatacacaaaagccggcaaaggagagattatgcgttttacactgtgtaaaacgcaaaaaaataaaaaataagccccctgacattgatttactgaatgaaatccggaaccattcggccattttcagccatcaaaaaagcaggcgtatgcctgctcttcttagcgtttcttttctttccgcaaatattttttttgatgctccctcaaaatgtcccctgtccagcctttctgccgcaaataaatataaatcagcagggttgatacaataatgagcacgatggaacagatatacgcatatttccaatgaagctccggcatgttatcaaagttcatcccccagagagctccaagcgccgtcatcggtgtaaagagagttgtaaaaatcgtcaaggctttcacaatttcatttcctctttgggaggtaatgacttcctcggcgtgcagcagattgctcagttcctgatcaaactcattgatatatgtaatccctctttccatcttatgatgagctctgaggtaatctttctgcctgtcatttttcggaagaaacgcttcttttaaagccatttccacttttttagcccccagtgtaaggcctttccaaatgaacagctcatggcgcagtttatgcacattttccaagattcctttgctgttgtcatcatgaatctgccatttcagcgtccgctgcttgacttcaaattcatccagtccgatcagataggaattcatcagctctcccagcagaacaaaaaagccttcaatcggattttcacaggtttgaatctgctgtgtggcatgcttttcttttacaccgcgcagcagcgaaaaatcaaaattaatcgtaaaaaagaagtctctcgtaatataaaagtgaaatacggtatggtttttttcatcatctaatccttgatgatagattaaagatccgaaaaccgcttcattattctgatcatttgtatctgagcgcagaaagtttatatgattttcatgttcaaaccacttttcgcattgcggccagtgattgtgatggatcatttttttcgcttccgttttttcatgcggaccgagctggtaccacagccagtccgcacccgaatgtaccttcatctcttgtcatcctccagtatcgctttcttgttttattaccgtaaatgaggcgggctaaaccaggttcgatgtttgagcagctttctacagtggtattattccgaaaaaagggaggtgcaagccttccttcgcggaaggcgttacattgtatatcatcaaactatccgccatcgtactatttatattattaacggcgtgttttgtcgccatagagttttcaatcgttaaagcaaggcgctcccgtattaatcagctcattgaggaagatgtaaaaggagcaaaagcagccaagcatgtcattacacacctcgatgaatatttatcggcgtgccaattgggcatcaccgtcaccgctttggggatcggctggctgggtgaaccgacagtcaaagcaatgcttcagccgttatttttaaagaccggagttcacgaagcggttgcccaagtactgtcattgatcatcgcctttctgctggttacatatgtgaatgtcgtcatcggcgaactcgccccgaaaagttttgctatccaaaaagccgagcggattacacttttgtctgccagaccgatgattttgttttataagttaatgtttccgttcatctggctgctcaatcattccgcccgcctgattacagccatgttcggcttgaagcctgcttccgaacatgaaatggcttatacggaagaggaattgcgggtgctccttgccgaaagctatcgaagcggcatgatcaaaaaaagtgagctgcattacgtaaataacatttttacatttgataagcgcactgccaaagaaattatggtgccccggaatgaaatggtgagcctgccgttagacagcggatcgggacatatgctccgggacattatcaaaacaaataaatatacccggtatcccgtcgtaaaaggagataaagatcatgtagtcggcatcatcaatataaaagaagttttattcagattcctgtcagaaggagcggcgtttacaaaacacgaactcagcccttacattcagccggcgatccatgtgattgagacgattccgatttatcaattgttcgttaaaatgcagcgggaacacgcccatatggccattctcattgatgaatacggcggaaccgcggggttagtaacggcggaagatatcattgaagagatcgtcggcgaaatccgcgacgaatttgatacggacgaaacaccttccgttcaaaagcttgggaagaaccgctatctcctgaacgccaaattgctgatcagtgacgtcaatgatttactcggaacagagattacggctgatcaagtcgatacactggggggctggtttcttactcagcatattgacgcgaagcccgggagcaccattgattttgaaggctacacatttacggtaaaagaaatcgacagccatcatatcatgacgattgaagctgacaaagctgaatagctgagggagaaatccctcccggccattcagctttttatcatcttaatgattcttttacgataaatccgttttttgccagcgccttcgccagactctgctccgttttcacctgagaaaaatcgatgccgagcttcacgacggtctgcgcgatttccggcctgatgcctgagattgtcgtttctatgccgagaagttttgtgctgtcaatcactttgaaaatctgataagcgaccatcgtatccacaatcggcacacctgatatatctaaaaataaataagaaagccggagtgaagaacattggtcaagcaccgattccaaaatcatttttgcccggtaggtatcaatttcgccgacaagcggcaaaattccaataccggcggcaatcggcataatcggcgcgctcagttcgttaatcatttccttttgggcgtttaattgtgtaaccgtcactttataatattcctctgtaaatacttcaatcatatggtcaattgctttgttcagcttctctccccaatggaataccgcattcgccccgggcttctcagacatcgtttcgcagcatgtctgtatacggttccagaccaatctccggaattctttaaagctcgtgacgctttcatagaccggtacttcatggacggcccggtcccttgcgaactgaagcgcccactttgtcagctcctcttctccgccttctttttccgataaaatgccggcaacgatttcaattaacagacggtgctgcatttccgctttctgatcatctgaaggccgccccgattttggtatgagcagccactggcgtgtgatttcacctgattcttcaattaaggttcgagataatgtttcattcaaatgtttcacgggtctcctccattcaaattactttgtatgtataaatcggcgccggacgcacatactgtaattacatccgatgggctatagccaagcggtaaggcaatggactttgactccgtgatcgttggttcgaatccagctagcccagtcccgcaaccgcaaaaaacgaagattagctgataaatttgatcagcggatcttcgtttttctcttatgatacagattgatgtaccgtttttttcttcgtcagcttcatcagttctcccggattgtatccgataacgagcttattgcgatcgatcagaatcggacgccgcagcagtttcggcttctcagtcaaaagcttcagcacttcatttacagtcatttcttcaatgttgaggttgaggtttttaaatgtttggcttctcgtcgccaatatttcatcaattccttcggtcgttaatgataagatctgtttcaattcatcaattgtcggtgtctccctgaatagatgtcgctcttgaaagtcaacattgtgggcttttaaccaatgtttcgtttttcggcatgatgtgcagctcgggtatgaataaaaaataagttctttcatttttaaaaattcctccctcggataatccgtctctttgttaacataagtaccctgaactttttttccctaaacgtatttcaaaaagatttttcggatcttttttagagaacggcataagatataaaacacagggaaagacataaattccacaataaatataatcatgaaaatgtttacattttgagtgccgatctattataataaacttcagatagactctcgggaggggataaggaatgaatcgcatgttccgggtgttaggattttggacggggatatttgcagtcatgttttttctagggggcatgaaagacgcttctcttttgttttttggacagacgatctttttcgtatttctttcttatttgaatctgactgagcggatgtatatttatattttcggagcttacttaaccgtatttttcgccggatttacatactactctatttttattatgacaccgggcggcggaacccactgaacagaaaaagacagaccgattatggtctgtcttttttcatttacagtgaaaaaccattgataaacgggtttcgctcctgctctgtctggatgtccgtttccggcccgtgcccgcttaacacaagtgtatgtccgggaagcgtgagcagtttttgatgaatggaatcaagcaatacgtcctgacttccgccgtgtaaatcagttcggccgatgcctccctgaaagagcacatcacctgaaatcaccagatccgcgtccttcacataataagaaacgcttcccggtgaatgtcccggcgtaaacaatgtctccaaatggaaaggcccgatgtccaaaatgccgtcgccttcgatgagccgttcggcgggccgtgccgttacggcgatgccccgcaatatgcctgatccgtttaaggaagagtcctccagccacttttcttcatttttgtgaaggtatacgggaacatcccatctgtctcttacttcgtcaagtgcgccgatatggtcaaaatgagcgtgcgtcagtaagatggccagcggcttcagattgttttcttttatgtaattgttgattttgtccgcttccccgcccggatcaaaaataagacaggactgatcctcactgacaagaaaatacgcgtttgcctgaatcggcccggccggcattcgtctccatttcactttcatcacctctttatgtatatgcccttattatgaaggttttctgcggaagattcaatgaatgcggccgggaaaacgctatcgacaaacaaaatgaaaacggttaaaatgaaatggaaagattttcaggttccaatgacaaaggaggagcatgatgttacttgttgtaatcttcggccttgtcgcattattagctgtattaggagtcctgcgggctgtcagacagagaaatatcctgggatttttgttagccgccgccacgctgggcgtgtttggctggtttaccgtaatgaccgttgtaaccagcggctatccgactgcacattaaaagcctgtatccaatggatacaggcttattttttattgctgcaaatgtttgctgacacttttgattttgctctccagcgtcgtttctttatcacgtctgtcatcaatgcggatatttgtcgccactctgtgcagccctttttggaacggggcttcgtgaatatcctgaatgactgcgaataagtcgctcagctcaccttcaatcaacgtgttcatcggcgtgagctgaaatttgattttgccggcagctttgtaaccctccaaaattttttgcacatccgctacatactcactgacgctcggtgtttttgttccgatcggaatgattgtgacatctgcaattgccatttggttcaaactcctttttcatttgttatgattggttctgtcatgcccgttttcagtgaaatcagacggtcatacgtaaagccgtataaagcgtattccccgttcggagagatctgaatcggctccatttccgtgtttttgagcaccgtccgctcccgttcgtctcctaagtcaaagctgatcagattgtaagagcggccttcaggcttaaatatgtaaaaccgcttgtgtgtctgatcgtaatcatattccatcggcgcgaagctctcatactttttttggagaggaaagcggtgtgtcacggatgccggcttttggaaaaagaactcgccgtctccgtccgattgatccgttggtctgacggcaatcgtcatgcccgggcgggaatcagcccagatgacgtgatgaagcactcttttttcttttttcgtctgcaagtcataagaatataaaggaccctcttcctccgtttttccttgcttgatatattggaattcatcagtggaggtccaatggacaaaaggggcctgaacgggactcttttttaaaatgccgttgttcatatcggccgtataggctgtgaagtcccatgtttcagtaaaaacggtaatcatcatttgatacgggtcatacggattccaagccgtctccagctcataagagttaaaggctttgtgataaagtcttttcccctgcttgttcataagcacaagctcagtctgaccgctgcttgtcacctgtacgagaatcagctgttttttccggctgatctttacattgacaatattgccctttgtttcatagagccgttcggattttccgctgaaaagatcatatttcatcagctgatgatgtgctgtatacagaattgttctgttatccagccatccttccgttttttccgcttcctttttactgagcggaacgattttctgttctgccgattttgccgaaacgcctgtgtcttgctgctgatgagatggttcacaggccgctaaacacagaacgaatgcggacagcagaacacaaaccaagtatctcatcagccttccctccattcttttctattgtcccatatttgtttatgtaaacaaatgagaaatttcacagatgtctcaaaaaacaagcgacctccacaaaataccttccgtcgcttgataaatatcagcaaactgatgaaaaggcaaagggttttttcccttcccgagctcaatggtatagccctcttttccatactgctgtataaaccaatccctaaaaccggcatggctgtcaatggttttaacgccttgatagcggtttccgcttatcgcttcaaactcccgaatcatctgggatgattgctccggttcacatccttcgtatccccagtaaatctcttctccctgcgtatgaagcgcgatcagccggtcaggtggctgttccgttatcagccggtgcatcgcctgcgcctccggttcagtgagcggcgccgttcctggaaaatcacggtatgaaggggctttcggtttgcgcctttgttcaatatcccaattggatgggaaatgtttatttaaatccacaccgtttatattcgccttccattcgcggaaatccgggcggtgctcatttaattcgttgaggaattcttttttttctgataaatcttcacatccgtaaagtacgagatcaacaccgtcgggatttacgagcggaacgaatgacaatgatgtccggctgaatatatcaagcacagactgcccgaaaacggttttattttcgcataatgccacggaatattctttacaccatttaagcgcgaccgaggtggtgatccattcattggcatgaaatgaggcgtttacatggacttttctttcggccgtatccgcacctattttcagctcataaagcggctttcccaatacggaactgccgattttacggcatgtgacaaacggaaagacatccgttattttctcaatttcttcataaaccgattcggagccgtacaccttttcttccttcacccattgatcagcggaaagaacgctttcacagtgccggatgtatcgcgaaagcccgctcagcgtctcaagcggcggaccctctgactgcccgctcacggcaaagccgggacaaaataattcatcgctttccgccgttttatcagcggctttcaacagtttttcatcaattgaaagcacctttgcaatatctttcatatgctgtttcaattcaggtttgacacgaattcccgccatgttcatcccccttttttaaaaactatatgacaggggagataaaaaaagaaagccgcccgcgatatgggcaggcagactttcttcagcagttttgatgtttgagccattcatttttggcaatccacgccccgccgatgactccggcgtcatttccaagtgccgcaatcgaaatatcggccgcttccgcagaacgcgggaacgcggtgattttgaaggtctcttccacttttgaccgcaggatttcccccgctttagacacgcctccgccgagcacgatttttgtcggattcatggcgcttgccagatttccgagcacgaggcctaaatgttttgcgacataatcgacgacttcaagcgcggtcttatcctgctgtttagccgcttcgaacacgtcacgtgccgtcagatcgcgcacttgtaagagcgaagagtcggaaaccgccgcaagcttttctttcgcgatgcggacgatgccggttgcggacgcaatcgtttcgatgcagccggattttccgcaattgcacggagctcctccttccggaatactgcaaatatgaccgatttctccgccggccccgtttttaccgtgaacgatttctccgttgacgatgatgcctccgccgactccggttccgagcgtcactaaaatgacatctttggccccgtcacctgcacccttccacatttctccgagcgccgcgatattggcatcgttttcaatgacggccggaatacccgtttccgcctcgagatggtctttcagcggatagtttttccaccccatatttgtcgtctcatagaccattcccgtcgtcatttccacaggtccgggcgctcccattccgatccattttacaatccgtttcggcttgttcagttcttccagcttctgatcaagcgctttggcgatcgtgaccgtaattgtgtttccggatttatcggtcggaacttcccatttatgctgaatttcaccgtacatgttgataaaggccagcttgatggttgttccgcccagatcaatccccgcaaaccatgtatcttccataataatctccttttcttattaaaatcctgctgtgttaactgcctctgatccgctccgattctctctgaagaactccggcggctttttgccataaatctctttcaatcacgtttgacaagtacatttcctttaattcatctttcataaagtcaatttcggcttgtctgtcaccgaaataaacaatatgtccgaatgacttaaacagctgctgcacgtcataaaatgaattcatcttcttcaccatttctattcttcttagtataagcgtatttcatcactgatccgggcgtcaagcaaaaaacgattggagaaaatatccttgtattattttcataaattgtatattcacaattgtaaaaaaacactcatttatgcgtttttctgttacaatactttcgtgcccaaaagcacaaaaggattaaagtttgatggggtgttgttttgaaacaagaaaaaaggctgacgttcatctcagccatcagtttatttgtcttgatgttagcagtcattatttcctgcctgtttttctttcatacagagccgcatatgccgctgttcttttgcgtcattattctgtctctggcaggtttgtggctcggtttctcgtgggagagtcttgaaaaaggaattgtcagcggattaaaaaacggggtgcagccgattatcgtgctggctttgatcggtgtgctgatcggcgcctggatgtacagcggcgccattcccaccgtcaccgtttacgctttgtcaattatacagccgagtcagctgcttttgaccgcattattttcctgcatgattatcagcacgcttgtcggctcaagtctgacaactgtcagtacaatcggcgtcgcgctgttaggggtagcaagcgcggcgggagttccgctcgaatggacggcgggagcagttatttgcggagcttgtttcggtgataaaatgtcaccgatgtccgacacgacgaattttgccgccggaatcggcgaaattccgatttttaagcatattcgccatatgatgggcaccaccgttccggcactgctgatcacgatcgttcttttttatattctcggttcatctgtttcaataaatgccgcttcaacgcaaaatattgaggcggtcatttccggaataaaagaggccgtgcacgttacgccttggtcgcttctttcacctctgttagtgatcattttagctgtgagacgggtttccgtgattccggtgcttaccgccggtattatttccgcagggcttctgactgctgtttttattcctgacagcagcattcaaggatttatatccgccctgcaaagcgggacggcgtttaaaaccggcgaccaggctgtggccagcattatcaacagaggcgggctccaatcgatgatgggatcagtctctctgattatgatcgcctttgcgctcggcggcctgatggaaaaaacgggcctgatcgcggcgctgcttcaaggattgataaaaggcgtgcatacgaaaggacgtcttgtcatggcgaccgtcttctcaagtataggcgtaaaccttgcgacaggtgagcagtatttgtcgatcttaattccgggtcaatcttataaacctttatatgacaagctcggcattaagcggattcaccttgcgcggtcgcttgaggacggcggaactttgatcaacccgctgattccctggggagtaagcggcgcttttatggcaagcgcattaggggtttccgtcgtcgactacctgccgtttacctttttcctgtacatttctcctataatctcaattctgctcggtttcctgaaaaaaagctgacaatacgagaaaacctgccgttttttaccggcaggttttcttatgcaaaaaatcccgcttaaaaaacgggatttgtttaaaatgcctgctgaatgaatttgtttctgataaacggtatttttaaaaagaaatgaatgaatgtccgtctgatccccggctggctgagcacgctgttcatcagacggtagcggttttggtaaacggctaaaacagatacggcgcataatgagtagatcaacaattttttcatcttatccctcctgcccctatcgtttgtcaaacagcgagaattattccggtgcaaaaagttttttatgcgattaagcgatggtttcagattcagtcacgatcatatcgaccggaatatcgtggggcatgcggggaatgcggtctgtcagctggcagtcaaagagaagcgacacggtacggcctttataaccggacaggtaccgatcataatatcctccgccgtatccgattctgaagccttcccggtcaaaagccacgccgggcacaatcacaaggtcaatgtcattttgggcggctttttccgtcagactctcgatcggttcgctgaggcccgcatatacggtttccagctgatcatacgcagaaaatgtacggaactccattgctcccgtctgcggaaagcattttgggatacagacttgttttttctcttgccaggcctgttcaataatcggccgtgtcggaatttccaggcgtgtcgagatggtaacggcgatcacgcgggcctgtctccattcttttaaagaaaacagcgtttcacgcatgctgcggcattttttctcccattcactttctgtcatgtcagaaagctttgcttttatatcggttctgatttgtgctttcacgtttctcaaacctccctgaaagacaaaaaagccagaactttattgaaagctccagctttttccgctgtgttaaacagcttattttgtttcacggtgtaacgtagattttttatcacgtgggcaatattttttaaattcaacgcggtccggattgttgcgtttgttctttttagaaatatagttacgctcaccacattcagtgcaagccaaagtaatattaacgcgcattattttccctccaaactaaatatcatttacttattcagacttatatataataccactataatggacggaatgctagagctgatttacatgaaatgttgtttaagtgcagaaaacatcagtttacgcttctgatcctctgaatgagcttgcgtcagaagaaggtaaaatatgacgaaacaggacaaaaaagggctttctgatacgaaatctatagagaaataaccgtttgctccccgagtaaaaaagattttccgacaaaattccgtttttttctctatttcctttagaatggcggcgttttatggtataaaaaagaagggcaaattaataatagaaggtgatgaaacgtggaaattgctattattgcgttgtttatcgtcagtatagcgcttattgcattctcatattctcaaagagatccgatgaaagacgtggaacaggagctagaaacgcttcagctttccgccatgcaggaaatttacaagttgaaaaagaaaatgacggtgcttgaagaagaattgctggaaaccaacctcgtgatccgcaaagccaaaagcagcggcataaaccaaaaaatcgccaaacaaatcatttcaaaatataacaacggaatgtctgcggaagccatcgcaaaagcggagcacgtgtctgtcgaggacgtcaataccattattaaagataatgagaaggtgctcgtatgacaaaacggggcattcaggcttttgcagcaggcatgattttagcgacggccgttctcgccgctgtcttctatttgactgaccatgaccaggcagccgccgttaaaaccgaaaaaacagcattgacagaaaaagaagtaaacagctacctcgacgatcagcataaagtctccgtcaaccgggatgactatcaaaaactgcttgattctaaagaaaaatcgttaaacaacgaccaaaacacagacgccaaaaagaaaaaagtaacatacaaactgacgattaaagacggaatgagcactgctgatgtgtcatccattcttgaaaaagaagggattattccttcagcgaaagacttcaatgattacgtcattgacgcaggctaccacaaagaaatccgcgccggccatttcaaagtcgattcagatatgagctttaaaaaaatcgtcaaaacattaacccgctaaaaaagcttgcaggcatcgtccattcagatggatacggccggcaggcttttttaatagacatataaaacggacccggttaatggccgggcccgtttttttcatccgaattttccggtgatataatcatgtgttttttgatgatccggctgagaaaatattttgcccgtatcgccccactccaccagttcgcccatatagaaaaacgcggtttgatcagagaccctcgcagcctgctgcatgttatgagtcacaatgacgattgtatacttttctttcaatgtcaaaatcagctcttctattttccgcgtggacacgggatcaagagcggacgtcggttcatccatcagaaggacgtccggtttggtggcgagcgctcttgcgatgcacagccgctgctgctgaccgcctgacagtgaaagcgcctgttggtgaaggcgatccttcacttcatcccagagcgcagctgcttttaaagattcctcggcgatttcaagcagtttctttttatttttttcgccgtgaattctcggaccgtacacgacattctcaaatattgactggggaaacggattgcctttttgaaacaccataccgatctgttttcttaattctgccgcatccgtcttttccttcagcagattgcgcccgttatagatcatgtcgcctgtcactttgacattcggggccatttgcagcattaagtttaatgttttaataaaagtggatttcccgcagccggacggaccgatgatcgcagttaccttccgctcctcaaaaccgatcgtaatgtcttttaaagcctgatgggctccgtaccatacgttcatgccgtgaatatcaaataaattctgtgtgtgcaccgcttccttcacaagactcacagtccttccccctatccgaactttccgttaatgtagtcatctgtcttttgcgctttaggactcgtgaaaatttgttctgtctgcccgtattccaccacttccccgtttaaaaagaaagccgttcggtcagacaccctcagcgcctgctgcatgttatgcgtaacgataataatcgaataatcttttttcagttctgtcaaaagcgtctcgattctggcgtttgaaatagggtccagagctgaagccggttcatctaaaagaagcacggcaggtttcatcgccagcgtacgggcgatacaaaggcgctgctgctggccgcctgataacgacagagccgatgaatgaagccggtctttgacttcatcccaaagcgccgccttcgttaagctttcctcgaccgcctcatccaaaacggctttcctgcgttcccccgcatacttcagcgcatgtgtgatgttattgtaaatggatttcgggaacggattcggtttttgaaacaccataccgatttcccgtctgagagacacgacattaatcgcttcacccaaaatattcagcccttcataaaggatctctccctcgcttcttgccgaagcaatggcatcgttcattctgttaatctgtctcaaaaatgttgatttcccgcagcctgacggaccgatcagagccgtcaccgcatgtttttcaatattcatgtttacatcttttaccgcttgtttgtcaccgtaataaattgataaatgcttcacttccaaaatcgaagactccggcaaacgctttgtctgttccgcttgttccctgatgatgtgatcgatcatgttttcgcctctttccgattaatttgccgtaagctttttataaatgacagacccgagccatctcgcagaaaggttaaacaagagaaccgaaatcaccagcaccgccgagccgccgtttgcaatcgcttcggcgtcagggatgattccctgcgtattgacactccatatatgaaccgccagcgtctcagccggcctgaaaatgttgaaaggagatgattcagaaaatgggttcaaatccgtaaagttcagccgcggcgttgtcagccccgctgtaaataacaatgcggccgcttctccgaatactcttcctgatgccagaatggctccggttaaaattgaaggaatcgcactcggaatcagcaccgttttgacggtatgccatctcgatacgcctaaagcgagagaagcttctttcagctccttagggactgcagtgagcgcgccttctgtcacccggaccataacgggaaggttaaagaccgttaatgcgagcgcgcccccgataatcgtgtagccccatccggtcaggtttacaaacatcagcatgccgaacatcccgatgacaatggacggaagcgaagacagcacctcaatacacgttctgataaaatcggtgattttattttggggcgcatattcagccataaagacgccgcccccacaccaagcggtatcgtgatcagcatggtgataaacagaatgtaaaaggagttaaaaagctgatcccgtattccgccgcctgaggcaatggcgctcgattttgacgtaagaaaacgcaaggagatttcagagacgccgtgaataagaatgtacaaaaacaatcctgccaaaatcgccgcgattacagcggcgcataacccgaatacaccggtggccaatttatccgttattttccggttcattacactttcctcctagatgacaagtagcgtatgagcaatataaacagaaacgacatgatgagaagaacaagccccatagaccataacgtattattttcaatactgccgtatgtggtatggcccatgtttaacgtgataatcgtcgttaatgttcccgccgtatcaagcaggctttccggcagaagctttgtatttccgataaccatctgtacggcgagtgcttctccgaacgctcttgccatcccgagcacgacagcggtcagcaatgtcggaaacgccgccgggataagcacctttctgattgtctgccacctcgtcgccccaagcgcatatgaaccgtcgcgaaggtgtttcggaagtgacgcaagcgcatcagcggaaatcgatgtaacagtcggcagaatcattaccgagagtacgatcgtccccgccagaaggctgtgacccgttccgcttgatttaaaagagccgataaacggaaccaatactgtaagacctatgaatccataaacgacggacggaatgccgacaagcagctcaattaccggctgcagcaccttttttccccaagtcggcgcaatttccgtcataaacacggcacccgcaataccgaggggcgctgcgatcagagcggacagaatcgtgaccgcaaatgatccgaaaataaaaggcagcgcgccgaactcaggttttgcctgggttggattccaattcagacttgttaagaactcaatcgggcttacaccatttacaaaaaaagattgcagcccctttatgccgagaaaaattgtgatcgccgctgatgccgcaatgataatcgcggcacacacagacacaatcacccttccgcggacttcatccaattgcctgttttgttttgagcttattaagcgttcgcttacagactctttttctctgtgatttatcatttgtttacactcctataaagaagaagaggcggggagcccgccctcccctcagctttgcttgccgtttgcgtcacgtgtgactttcatatcagagatcggaatgtagccctgatcttttacgatacttttctgtacttcatcgctgttcatatagtcaagaaacgtttttgtaaggcctgacgcttcacctttcgtataagagtgctcgtaagcccaaatcggatactcgcctgtgacgacgtttttctcttccggtttgatgcctccgatcgataaaggcgttactttgtcatcgtttatataagagaatgccagataaccgattgctcccggcgtttccgcaatgatttttttgactgtattggaggaatcctctgtaatgccctctgcaggctctgctccgtcaagagcatatttgacgaacgtagcgcgtgttccagatgaatcaggacggttcacgagtgtaattttttgatctttaccgccaagctctttccagtttttaattttacctgtaaagacgtctgtcagctgttttttggttatatcctttacgcccgcaccggggttgaccgcagccgccatcgccactaccgctactcggtggtcttttagggctttcgcatcaatgccttctttttcttcagcgaagacatctgagttgccgatttgcactgcccttcagacacttgcgaaagtcctgttcctgaacctcccgcttgcacctgcacatcagcatccggatgtttttccataaacttttccgccgctgccagtactaacggctgcatggctgatgaaccagaaatggttaaagaacctgatgcttttttatcctcacttgcagattgactgtctgtcttgccgctttcctttgcatttccgcatgctgcagcaacaatcataacagcagccatcagaagcataagcatccatttgttttttttcatttcctgaattccccctgcatttaatgtgtaatttgtcctacacgtatagagtaaagggttcttgtaaaatgcgtataaatcaagtgttaaggttttgtaaatccggatgtttttttgtataaaaaaaacgctcacaggttgtgagcgtttttctgttagttgcttgtattgccgttttcagcgtcttcctgaattttatcttcgtttttctgcttcgtattattatcttcttgtttctttttcagctcaaagtatttgtccagagctgctcttcctatatcattcgtaatcgaatatcgatcgctgtaattaatataggcccaaggaacgactacagaaatagccacttccggattatcagcaggtgcatacgcgacaagagtcgtattatacgttccttcacccgtctctgatttgtcaggaccgtcatagaaagattgcgccgtacccgttttaccggcaggactgtatgtcgccgtcgcaaaatcagttgcggctgtcccttttgtcatgacacgtctgaaacctgcctgcacttctttaatgtctgcatgattcatatcaatcttgttcagtacttggggctgaacagactctacaacggctccgattccttttttcgaatcaggctgtctgacctcttttacaagctgaggtttcaaacgatagcctccattggcgatcgttgatacatactgcgccatttgcagcggtgtaaacgtatcatactgcccgatggcaaagtctaacagaagaccggaaattcgctgtgtcccttggtacccggttgcttcattcggaagatcaatcccagtcttaactccgagtccgaactgattgaagtagtatctgaaagtatcgaatgccttcatatcaagcggaagggactggccttttttgtactcccctttaccgacagcaatcgccgttttgaacatgaacacgtttgaggattcctgaagcgctttttggatatctacgggacctaaattggtccatgattttttcgggtttttacttcccttgaaatacataggttcatcctggaaaacggtgttcaaattaatcgcgcccgtctgcagtccggtcaacaccgtcgctcctttgaccgccgatcccattgcgtaggaggaagtcattgcgccgagggcataatcattaattttgtactttccatgatcattcgtaatctgtttgccggccatcgtcagcacttctccgtttttcgggttcatcatgacgacgaaggcccgatcaagaagcttcgtgctcggtctcgcttttgccgatcttaaatttttctcaatgattttttcaacggatttctgcaggtccatatcaatggataatacaaggtctttgccggcctgtccttttgaaatcactttgctgcccgtgacatttccggatgagtcggttaagttctgcactttctctttttgaccctgcagcaggctttcatattgatattctaaatagctttttccgaccctgtcattccggctgtagccgagtgacagatagtgatccagcagattggaaggaagaccttcgttcgcactggatacactgccgagcaatgtccggatcaggcttttataaggataagaccgttcccagtcagacgtcacgtcaactcccggcagttcatctaaatgttcgctgacgacggccatttcttttgccgacaccccttcatttttgatgtattgaggcgtcagtgagtagcctgaatccatctgccttttgatcgcaaggatctgcatatcttttgaagtgagctcattcagctgtttgtctgtgatacgtttcagctgaagctgatataaatcatcttcagacagttttttgtcttcagctttttgcttttcttcggccgtaatcagttttttcgcttcatcaggcctcgttaacatccaatagtcttttttatcccgctcagtcacctttttggtgcttaccttaatcatacccgacagtttttttgcgatttttaaacgctgcgcctgggtggttgaggctgaacgtgtatatgtaatcgcatttaatgctttattcgttacgatgggatttaggttccggtcgtatattttccctctcggaaccgccgtgctgacatcagactcctcctgcttattagcggcgtttttataatcatcaccctgaacgatctgcttgatgccaagctcgacgataatccaagtgaaaataagaaacgcggccaaaaacaaaaaattaagccggatcggcagtgattttttcttttctttgtttacagctattttctttttatttctcctcatgacatcaccttttcttatttacagaaagaaatgacaccttctgttcaggtgtcatttttcattctaaaggttttttcgatatttttctacagataacccttttatctttctccttttataaaattcggttccgccgcctgtttttgtcggtcttcttctactgtttcatcagaagtttccgtatccagtctgatgtcttttataaagtaataaatcagcggatggccggctccgagcagcacgagcgccgccggtattcccactttttccttgaataatgtaacgattacaaggaaacaaaggatggaaacgatcctgcccgcatttaaaaataactccctgagcacaatgtattcaattctggcttttctggcaagccgcgcccggcctatcacatcatatgtaagcgagacatacggcacgagcagaactggatagccgatcgcaataaacactccgtacaaaaggagcgtcgtgaagctcattttaaaaatgataagaaacagggcaccgtacaagatcaatccgccgataagaatcgcctttttccgagctctttttttgatgagccttgatgcaaaataataggcaaaaaaagaaaccgcggaattgacgagaccgaatgttccgagcgccagctcactgtttgtcgcaatgaatacaaaaacgctgattaaaaaaacaaaaatcccttctctcaagccttgaaaaaagtgcgcgttggtaatccggcgccaattcagattcgtgtggcgctcatcaaaaacttttttcagcataaaccggcctttcgactccctccgcttcagaaaaaagctcatgaccacggcaagggcaaataagccgagcgacaggctgaaaatgattgtataacccgtattgttttcaagtcttgaaatgacatatccggccacaatcggaccgatcatgcccgccgatgaagacaaaatgcctaaaaacccgttaaaaaaatctctcgtttccggttccgtaatttcgaacgtcagcacattaaaagccagccagtaaaagccgtatccaactccgagcacggcccctatcaaaacgagacgggaagccgcagtttctccagcaagcagcacacttaaataaaaagcggccaaaaagataacgccgaacctgagaataaacaccctgtcaatttttttagccagccggccggccagcagaaaggtaaccggctgcatcgttacgaccgacaaattgtatatggccaaatcaataaattttcccgactgcttccacaaatacacgttgacaaatgtatttgacagcgcgatgcccaatgagtaaaggccgccaatcgtcaataacagcagcagccctttatttatttcgatgtcgccgataattttttttattttgctcatcattgactcccctttactacacattagtttgtctcactcaaactgagatatgtaaaaggattcaaagtcaataaaaaaacaaggcctcccgcgggagaccttgtttgatcgaactatttattttgcttcgctgtaaagacgggcaacttcatcccagttcacaacattccagaaagctgaaatgtaatcaggacggcggttttggtagttcaggtagtacgcatgctcccaaacatcaagaccgaggacaggtgttttaccctctgaaagcggtgaatcttggtttggcgtgcttgtaatttcaagtttgccgttgtttacaacaagccaagcccagcctgaaccgaaacggccggcagctgctgcggcgaatttttctttaaattgatcgaagcttccgaacgtgtttttgatctcttcagcaagctcaccagtcggttcgcctccgccgttcggagataaaagagtccagaataaagagtggttggcatgtccgccgccattgttgcggacagctgtgcggatgtcctccggcactgcgttcaaatcagcaacaagctcatctacagatttctctgcaagcgctgatccttcgatcgctttgttgaggtttgtcacgtatgtgttatggtgcttcgtatgatgaatcgtcatcgtttccttatcgatatgaggttctaaagcatcataagcgtaaggcaattctggaagtttgtaagccataatttttttcctcctttaaatatatgtactgaaatgccgcttaacgcgaacttttctaatctcaatgtaacaaaagaaagcatggtaatcaatgaaaaagctcacaatccggcgattccagcagacatattacactttatccgttccctgccgaaattaaacctttctaaagcaccgtccataagaaatatccgatcataaagagctgaatgacgccttttgccgccacgcttgttaaaaaaccgattaacgagccgagccccacttttgccgcggacttgatatccttttgatgaacaaacacctcagcgcagacagcaccgataaacggccctaatataatgcctgccacgggaataacgaagggcccgatcaataatccgatcgtgcttccccagattgccgccctgcttcctccgtaccttttaacgccaagtaaatttgacacataatcagctgcgaataaaacggccgcaaataccgcctcaatgagccaaaacaggtaagaataaggactgaaggaaaacaaaaatccgtagagaagaaaaccggccacaataaaaataacgcttggaatcaccggatatacaagcccgataaaagcaatgatgaagaccgcaatgataatcagccaatacaaaacactcatgacaaaaacaccctcctttgttttgcgggcgatcaccgcttcccgctttatcttattatgtatgattccttatcaccgctttaaatactctcacttgtgttcatcccctgtgaacgatacaataagcaacatataccagtttaggctaggaagtgaagatgttgaacatatttacggctttattgaaaagtacatactctccggcagatattgcaaaaacacggtttcaggggataggaaaagcgatcctttatgtatttttgctgtctgtcctttttacgctgccaagcgcttattacctttgctccggcaccgtaaactcaatgaacggtttcaaaaccgtgttaaagaaagatttccctgatttcagcatttcaaacggagaattgcagacgaaagcgtccgcctctaaggaaacggaagcgaacgggttcgtcatcgtctttgatcccacagatgcttacggcgcgaaacaaatagcggcgaaacaaaatgcgatcggcattttgaaaaataaaatggtgcttgctgtagacggacaagcgacagaaatgaattattcgctgatgcctgccgatatcacaaaaaaagaaatcatatcagcattaaaccaaaataaaacaatgatcgtcaccgtcctgtccgttttgctgttcatcatgacagcggcaggcaaattcattgaagtatcatttctcgccgtcatcggcctgatattgaaaaatgcgcaaagaaagacattgaattaccagcagctctggaagctttcggcttattccattacactttcgaccgtattctttacgatcatgcgcgcgcttgttattacggtgccgagtgaatttttagtgaattggtttgtaaactttatcatccttttcctcgtcttaaaagagataccgcgaagtaaaacagatgtataacaaagactgcccccggcggtcttcttttttgtcatgaacaaaatgggacaagcatacaatgaagtaaaaatgtatgcgggaggcggttggaatgaagcggcttacttttgtattcggcagtttatttgtgatattcattatcttttacgatcttaaaatcggcacgatcccttctcaagaccttccagcatacgcagcggcggcacagccagcccaacaggaagcttcatacagaacggttacggtcaaaaaaggcgatacggtgatgtcgatagtcggcgcacataaagcgccagatgatattgcacaagattttgaagcgctgaatccgaatgtaaaagcaaacgccattcaggcaggcaccgcttataaattccccgtctaccgcaattaaacgttaatttcttgtcagttcggcaaatacactgttacaatataacatgtaaatagaagttgcctgacatgtaaaaggctcagcctgcaaaagcggtaactacaattaaggagcgattgacaagtgagtgaaatcacacatcgtacaaaaacgcgtcccgtcaaagtgggacctttaacaataggcggaaataacgaagtcgtcattcagagtatgacgacgaccaaaacacacgacgtagaagcaacagttgcggaaatcaaccgtttagccgaagccggctgccaaattgtccgggtggcatgtccggacgaacgcgccgctaacgcgattgccgacatcaaaaaacaaatttccatccctctcgttgtcgatattcattttgactacaagcttgcattaaaagcaattgagggcggggccgacaaaatcagaatcaatccgggaaacatcggccgtcgcgaaaaagtggaagccgtcgtaaaagcggcgaaagaaaaaggaattccgatccggatcggcgtaaacgcgggatctttggaaaagcgcattttagaaaaatacggctatccgactgctgacggaatggttgagagtgcgcttcatcatatcaaaatcctggaagaccttgactttcatgacatcatcgtcagtatgaaagcgtctgacgtcaatctcgccatagaagcatacgaaaaagcgtcaaaagcatttgattatccgcttcacctcggaattacagaatcgggcacgctgtttgccggaacggtaaaaagcgcggccggactcggagcgattttaagcaaaggaatcggtaacacgctccggatctctctgagcgccgatcctgttgaagaagtaaaagtagccagagaactgctgaaatcattcggtcttgcttcaaacgcggctacgcttatttcatgcccgacatgcggacggatcgaaattgatctcatcagcatcgcaaatgaagtggaagaatacatttctaaagtcaaagcgccgattaaagtagcggttctcggatgtgccgttaacggaccgggcgaagcaagagaagctgatatcgggattgccggcgcacgcggcgaaggacttcttttccgcaaaggccaaatcgtccgcaaagtccctgaagaaacaatggtcgaagagctcaaaaaagaaatcgacaagctggcagaagaacactatgcaaagcttgaagcagaaaaagcaaaagcagaacaagaaacacaaaaagcttgacggatattccgccaagctttttttttgcgttgtgttaaaaaaacggtgtaatgaagatgccaagcacaagggaaacaataccgattcccatcgcccatccgcctaaagcgcctgctcctcttcttctggcgatatagccgacgataatgccgcatgcccctaataaaacagggagcacaaacagggaaatgatagaaatagccaatgctgcataccctatcccccggccttcacttactccgtcccgattatcatcacggtctgctgcccggtcagaagcacgatatggctctgagatttcggccgctgtttcttctgaataaacatcacgcgtgatatcggttccttccgatccatgatccacgtaatagtcgttgccttttcgattttcgtaatcgtatgccaccttcaattccccctttttcttttatgaaaggagcttttttagtttccgcgttttttacggattcatgtttgctaaacttttctggtattgttaattgtttatgttacacttgaagggatgaatttataggagtgtggacatgttacggttaggtatagatattgacggcacagttacggcacaggatacatttgtcccttatttaaaccgctcatttcatctttccattaccttggatgatatgactgattatgatctgacgaagcttttgaacattacagacgaggaattttgggaatggatgaacgttcatgaagcagccatatataaagaagcgaagctcgcggaatttgccaagcaggcactggacggactgaaagaagagcaccgtcttatctacattacggcaagacgcggccacttagaagatgttacgctggactggtttgcaaaccgggacattcattacgatcacattgagcttgtcggaggccatcacaaagtggaagccgtcaaaaaacacggcattgatttatttttcgaagatcaccacggcaacgcgacaatgatcgcaaaagaagcaggcattccggttatcctttttaactccccatataatcagctccccatcgattccaatattatcagggtgcataattggcttgaagccgtcgcctggattaataaaaacaaacacagctttcagcatgttaaaagctgaaaaaaacctcctgtatatagcaggaggttttttatcggcacgccggacaggtgccgtaaatttcaaacttatggccgctgatttcatacccttccaaatcatcgtgcagcttatccatcggacaggactcaatttccttcgttttcccgcaggttaaacagataaaatggtgatgatgatgggtataagagcatgtaaaacggaacagtttttctccggaaagctccgtcgtttccaaaatgccgagttcttcatataacgaaagatttcggtatatggtatcaaaactcagacccggatagtcgtcatttaatgcggcaagcacgtttttggcggtcagatatttatcagaatcagcaaaaagctgcagcatgtcttctcgcttactcgtatatttataccctttttctttcagcaggttcaacgcttcttgtacgttcatgaggacctcccctttacaacacggtatcgctccaaaaagaaaatggcagctgtctgaacagcaggccattttcttatgatgtatcaaattatacctataaaatgatgaaaagtaaatgaaagcctagtgaatcgcggttttgaacttaccgcccctcgtttcatgggtattcatgatcgtaataaaggcgtttttatcaatttcaaacacaatggatttcaatttagtcacttcaagccttgtcacgaccgcgtaaatgacttctttggattcatccgtatatccgccttttccctgaagcttggtggttccccttccaagccgatgcaagattgcgtctgaaatttccgcatactgatctgccacaataatgaccgcttttgtttcatcaagcccctggatgacggcgtcaatcgttttcatggcaatataataagtcatgaaagaatacatcgcctgctccggaccgaacacaaaaccggcccaaataaaaataaacacattgatgagcataacgaattctccgactgagaagggcagcttttttgtgagaaggataccgagtatttcagtaccgtccatcgagcctccgtttcggatgacaaggcctaccccgaaaccgagcaaaagcccgccgaataccgtcgccaaaataggctgggtcgtaatggcctccacatggtgcaaggaggattcaatcagcgctaaaccgacaattccgataacagtagagatgagaaatgtttttccgatatatttatatccgaaaatcataaatggaatgttgagtaacacaacgaataaggcgaaattgaggaggggattggacataaagaggtggtctaaaattaatgaaacaccgataatgcctccgtcgataaaattattagggaccagaaacaattcaatacttacagcggctgaacccgccccgatcagaatcataatgaccctgaagataaagtgtaaaaatgactctcttttatgctgtttatttggggtcataaaatctcctttcctgtaataactattttaaacagtaagcaacttcattttaccattaaaagccgtaacattttaatgatttgctcaatacattatgtctaaagaggtgaaagtatcgatgattttaatacaaagaattattttgcagcggctcaatcaagtcactgcggacgatcttctgaaatattccaagcaatacggaatcagcattacgagaagtcaagcggctgaggtagcggctctgatgcacggaaaaaacatcaatatttttgatgaacaggagcggcttcgcctgctgaaaaaagtagaaacgataacctcaaaagaaacagctcggaaagttgacgaacttttcaaccaattctcagggtaaaaaaggagggggcaattccccctccttttttattgagctgatattttttcaagaagctcctgatcaaactgcttttctttcagcatttcgatttcaaaacggtacggcggcttcttatttttcttgtcttcgcctacatacggtgtttcgaggattttcggaatatcggcaagctgctcgtgatgaacgatgtactgcagagcgtcaaaaccgatctctccgaacccgatattttcatggcggtctttccgggcgcctttaatatttttactgtcattcacatgaaggacttttatccgatcgatgccgacgattttatcaaactcgttaagaacaccgtcaaaatcattggcgacatcatacccggcgtcatgggtgtggcaagtgtcaaagcagacggatagatgttcattatgcgtaacccccgcaatgatctcggccagctcttcaaagcttcttccgcattctgatcctttgcccgccattgtttccagcgcaatctgcacgttttgaccgggaacaatcacttcgtttaaaccttcaatgatttttttgatgcccgtctcagccccggctccgacatgcgctcccggatgaagcacgatctgtttcgcgccgattgctgccgttctttcaatttcagaacgcagaaaatcaacacccagctcaaacgttgccggatttgtagtatttccgatgttaatgatgtacggcgcatgcacgacaatctcatcgatgccgttttccttcatatgggcgcggcccgcttcgatattcaagtcttcaatttttttgcggcgcgtgttttggggagcgcccgtatagatcataaatgtattcgccccgtacgaaacagcttccttgcttgcggcaaggagcatatgttttccgctcattgagacgtgtgaacctattttcagcaacccgagtcccctactttcctttgttagatttgtttcttctctgctttctttttatcttttccatttcgtagctcattttctttttatagcccggcttcacttttttcggttttttcacgaggcgcttcgccatttggtcggcctcattctccgattttttgcgttttttgcggcggtggcggtcatcgcctttcttccattcgccgtttacaagctccgcatagtcaaacacaatacccatcttttcgagtcttacgagcgcatcttcgtcagaaagctcataaatggtcagtgcttggcctgatgaaccggcgcgtgcggttctcccgacgcggtgaacataaaaatccagatcgtccggaagctcatagttgatgacatggcttacgcctttaatgtcaattcctcttgccgcaaggtctgtcgcaatgacataagtgaattccagatcattaatctgcttcattaccttcttacgctcacgcggcgttaatcccccatgcagaagaccgatcctcatgcccttttcagtcaggtatttcgcaatatggtcagccgtgtttttcgtattggcaaacacaatgcccagataaggattcagatgagacatcatatcaaaaagcagcttgtctttatcacgctgtttagaaggaaccaaaacatgttcaatcttttcggctgtgattcttttcggctcaacatgcgcgtacttcggattttccatatactttttcaaaaacggcttcagcttttccggaatcgtagctgagaacacaagcatctgaagttcttccggcatccgcgatccgatataatcaacatcttctaaaaagcccatgtcaagcatcagatctgcttcgtcaatgacgagagactgcgctttatagacgttcaatgcctgcgccttaatcagatccgcgatccggcccggcgttccgacgacgagatgaggctgtgttttcagcttatcaattgatttttgcttgtccgtccctccgatgaaacattttgtccggatcggctcatcttccgcaccctgtgtgattttgagcgcttcctgatgaatctgattggcaagctctctcgtcggcgccgtgataacagcctgcaccgtatcagaacccggatcaatccgattcaaaattggcaataaataggcgtgggttttccccgtccccgtctgggactgcccgatcacgctttcgtttttcagcacggcgggtatcagccgcttttgaatatctgtcggttcataaaaaccaaggcggtgaactgcatctataataaacggttttaagttgtatccatcaaatttagtttctttcatttttcccagctccttaaagcggcacattctgtgtccatcatcacattataaccgattttacttaaaaacaccatgtcttgggggaatcctgttttcgagacagaaaagcaaatgccccctccgatgcatattgtaatagcagagagacagaaaggaggtacaagtatgtttccacagcagccgatgagaaatatggcgcagcagggccggccgttgatgaatccgcgtatgatgatgggaggaagaccgtcattgccgggccggcagctgatgcagcagggccggcagcttttccctcagcagcagattgccggagcgggcctgagaaacgcaggcacgggcggcggagggggcttaaaagggatgctttcccgttttttacccggttcaggaggaggaagcgctgccgcgtcggcaccggcggcggccagcggaggagcaggtgcaggactgcagggaatacagaacctggcaagtccggcatccctgtcgagcatgctcggcaacgttcagaaggtgctcggcgtggcgcagcaggttacaccgatgattcagcagtacggtcctttagtacggagtctgcccgccatgatgaagctttacagccaattaagcagcagcgatgatgagaatgaatctgacgagacaaaagaaacaaacgaacaggataaaaaggatgaagctgaaaaaacagatgaaacagaagatgaaaacaaatcagacgcctcatccaacacatcaaagaagacgtctgaaaaagcatccgcttcaaaagaaaaagacgccgcacaggcagactcagcggaacagccgcgtccaaaaagaacatcgggcagatcaaagccgaaattatatatttaacattctttgatatctcacgaaagattagctataatgagatcagaagaatgcaagatttgagccgtttaactacggctttttatattgcctctacactcacttttgataggaggacatctacattggacgttatcaaaatatcgccgcgcggctactgttacggcgttgttgatgccatggtcatagccaaaaacgcgtcactcgataaaacactgccaagacctatatatatactcggaatgattgttcataataagcatgtcacagatgcgtttgaggaagacggcatttacacgcttgacggcacaaaccgtctggagattttaaagcaggtggaaaaaggaaccgttattttcacggctcacggggtatctccggaagtaagaaaagccgctgaggaaaaagggcttgttacgattgatgccacatgcccggacgtcacgaaaacacatgacttaatccgaaaagtaaaagctgaaggctatcatgtcatatacatcggcaaaaaaggccaccccgagcctgaaggagccgtcggcgtcgctcctgaaatcgttcatctcgttgaaacagaagaagacgtcagaaatctcgatattcaggctgagaaattaatcgttacaaaccaaacgacaatgtcccagtgggacgtccacgatattatggaatcagtcaaagaaaagtacccgcacgtggaataccatcaggaaatctgcctggccacacaggttcgtcaagaagctgtatcagagcaggcaaaaaaagcggacttaaccattgttgtcggcgatccgaaaagcaataactccaacaggctggctcaagtgtcagaagaaatcgccggaacaaaagcctaccgaatcggagacatcagtgaactgaagctcgaatggctgaaagacgtcaataccgtcgccgttaccgcaggcgcatcaacaccgacaccgattacaaaggaagtcatccgctttttagagcagtttgaccacaacgatgaatcgacatggcagcttgaacacagtgtgccgctcaaaaaaattcttccgaaagtaaaaataaaaaactgaggcccggggcctcagtttttttataagaaggtaaatgggtttgtatctgtttcggaagcgaaaatgcgcacgtcatagtttttctctccggccattgccgtaagcttctcagccgtgccttttctcatgatcttttcagcataatgccccgggtccacgacgtttaatcccatcatcatcgcatcatgcgctacatgaaaataaaggtcgcccgtcacgtaaacatctgcacctttccgctttgcctgataaatatatttatttccgtcgccgccaagaaccgcgacctttttcaccttgctgtttcgctctccgaccatccggactccgttaacgtcaaacttttctttcacaaacagagcaaactcttcaagcgtcatgtcctgctgaagttttccgatccggccgaggcctttttcaagcggagactgctccaccggataaatatcatatgccacctcttcatacggatggctttttttcagcgcttttacgacggttttctccatacttgccggaaaaacggtctcaagtctcacttcatggacgagttccagctctcccgtctgtccgataaacgggtctgccccgtccagcggcttaaagctcccgattccctcagaagagaacgcgcaatggctgtaattgccgatatgtcccgctccggcgttgccgagtgcggttcttacagcttcttcatagtctttcggaacatatacggcaagttttttcatcgggtccgaatatgtcgggacgagcacttcagtgtctgtcaggccgagagcttcggcaagcagatcgttaacaccgccgtccgctacatcaagattcgtatgagccgcatatacggcaatatcatgctttatacatttctcaatcagtcttccgcccggctgatcagtggtgatctgtttaagcggccgaaaaatcggcggatggtgggcgataattaagtcaacttttttctcaatggcttcatctaccgtttgttccaaaacatccagtgtcaccatgacatttttcaccggcttattcaatgtaccgatctgcagtccgattttatctccttccaccgcataagccttcggtgaaaattgttcaaacagctggatgatttcctgtccgttcacatgtttaggcatgtccgattacctccttcagcagagaaatccgctctttcaattcagctaatttttcatgattttcatgctttgcgctgcggctgatctgttcataaatttgttcagtatgcttaagttcctggctccatttccgaagaaacacttcattcctctcttttaacaaaaacggacccgcaagcattccgacagccatcggcacatcccgataaggcgcatcacggtcgccagtttccgcaacgaggatttcataacactttccgtcttcttcgagaatcacttcatcaagcagttcatagccttcctgatacagccactctcttatatgaacggcatgaatattcggctgcagaatcagccgttcacgccctgtcaatttcgtttttcccgactccaaaatatgagcgatcagcgctccgcccatgccagcgatcgtaatggcgccggcttctcctttttcaaggacgctcagcccgtcacctttccttacggagataagagtgcttaagtgcagtttttccacctgctgtttggcggatagaaacggtccgtctgtaatttcaccggcgattgcccggcttgccaaatgattcaaaacggcatagcaaggaagatacgcgtggtctgacccgatatcagcaaccagggcacccggagggatatattccgccacagactgcaatcttttcgataacttcatttcattcacaatatcacaacttttctcaggttctttttcctttactatcatataaaaaaaccgcccggaatccaagcggcggatagagtttttcatatgtcttttatatagggaccggtaaagctttatttaatgtcagaaacccattttgccatgtcatccagcttttcggccggcacaaggcccgcgggcatcccgttgccgcctttttcaatttttgttttaatctcagcgacatcttttcttttgccgacgccttttaagttcggccctgacacaccttcatagttttctccgtgacaggtgatgcagttggctttataaatctcttcaggtgaagcgtttgcagtttccttctcggcatttttgctttcaccgccgcttgcgatctgatgcgcatctccattgccttttacagctaaaaagaaagtcagccctattcccagcactgcaatgagcaaaaaaggaatcagcggattccacttcatatctccatccccctttttcattctccccctatgtaaacacttctaattctaacttatttttacaaaaagtaaatggtcttgctcagcaatttcaatgatttcacaatttatacaaaaagcaaaaataactgttttgcttaccacaaaattatctttattctattgtataatgaattgtatacgcttacaataaagaatataaataaacttgtctcatttcccccctttcaggacatgccgcattttttccaaactcatttgcaaaacatatgcttatccagtaaaataaaggtatattatccatatatcttatacataaaaaagaacggatcaaaaagacccgttccattctattcgagaaaatccttcagacgcttgcttctgctcggatgtctcaatttgcgaagcgcttttgcttcaatttggcgaatacgctctctcgttactccaaacactttgccgacttcttccaaagttcttgtgcgtccgtcatccagaccgaaacggagacgcagcacgttttcttcacgatctgtcaacgtatccagcacatcttccagctgttcttttaaaagctcatatgccgcatgatccgacggagatgtcgcttcctggtcttcgataaaatcaccgagatgtgagtcgtcttcttcaccgatcggtgtttctaaagaaactggctcttgagcaatttttaatatttcacggactttttcaggcgtaagatccatgtcttcagcaatctcttccggtgtcggctctctgccaagatcctgaagaagctgacgctgcacccggattaatttattaatggtttccaccatgtgaaccgggatacggattgttctcgcctggtcagcgatggcgcgtgtaatcgcctgtctgatccaccaagtcgcatacgtactgaatttatatcctttacggtagtcaaacttctcgacggctttcatgagacccatgtttccttcttggatcaagtctaagaaaagcatgccgcggccgacataccgtttagcaatgctgacaactaaacgaaggtttgcttcagccagtctgcgtttagattcctcgtcaccctcttcaattttttgagcgtaggtgatttcttctttagcagaaagaagatttacccgtccgatttccttaaggtacatgcggactggatcattgatctttacgccaggcggtacgctgaggtcattaaggtcaaattcttcttcggctttggcaagctgttgaatattaggatcttccgtttcttcattttcactaattaattcaacaccttgttctcctaaaaattcataatactcatccatttggtctgattcaatttcaaagctggacatgcgttcagcaatttcttcatatgttaaaacgccacgtttttttccagtttcagtaagctgctcttttacctggtctaatgtaagttctgtttctgtttcgtgggtttgtttatcagccattatggatccctccttccaaagcttgcaacgaattctaaaagcggtatgtttcttatccgacccggaagccttctctctttttcagcatgcagggctgcggataataatgacaattcatgatgaggttaagcgatctatttgctcctccgcaaggaatcattgccaatcagaacgcaagcctctatttgttgttactttaatgatcggttcaatgcaacaatttcttgagccagagacgcagctttcacgaagtctttctgcctctccgcatccgctctttctgcttctttttcctttatcattgaccattttcggtgatccaacactttttttacgtaatcggataactcggcctctgagagctcctcgtttacttggagcatccctatatctgaaagcagctggctgatttcctcatcctgcattctcgccataagatgctgcggcgtcatgtcagcaccctcttcataaacagcgtacaggtatgctgccagcgcacgatgtccgtcaatgttaaattcaaagccgacacgctcaatcactttcttgatgacgtttcggtctctcagcatatgagcgagcagaagtctttccgcgttctcataggcgggacggagacggcgccgtttcgctttagtcgtcacccgggcccgtcttgtctgcggttcggcgtttttgtcgccgggggcgttttgtctggcgtagatggaaagctgttccgtcaaagattctaccgaaagagaaaattctgaggcgagctgcttcacatacatttcctgctcaagcgacccggaaagagcgctgatttctttcagcacttctttcatataagcgagccggtctccttcgtcagataagtttttccctttgcggaaatattgcattttaaaagccatgaccgtaacgcttgcatcaatgatatcggtccggaatttttctccgccccgggttctgatataatcatcaggatcaagcccgtcaggcagcatgcttactcttaccttacaatcggctttctggagcaggccggccgctttcagcgtagcttcgtacccggctttatccgaatcgtagcagagaatgacctcctgaacatttcttctgaggattttcacatgctcttcggtgagcgacgtccccattgtggcgatactttcttttacgcctgagctgacggcggatatgacgtcagcgaagccttcaaacagaacggctctctcctctttcctgatcggcaggcgcgccttatgaaagttatacagcagcttagatttatgaaacagcggcgtttccgggctgttcatatacttcggctgctggcttccgagcgcccttcctgaaaaagccgccacggctccgtggtgatcatgaatgggaaacataattctgtttctgaaacggtcaaaatacccgctgccgtcttctcttctgatcagcagacccgctttttccatcatttcttcctcaaaaccgcgctttttcaagaatttcgtcatgaaatcccaggaatccagcgcgtagccgatttcaaactcatctatgagctctttcgtaaaaccccttgataaaaggtaatctaacgcttcctggccttcctttgtatttattagcaaatgatggtaaaatttcttcagaagctcgtgggcttcctccatcttctgctctccggaagattcaggcctggatgcagagtgaatcgttatatcatcagggaaatcaatctgatatttatccgcaaggtgagaaacagcttccgtaaatgaatagccttccatctgccgtaagaaagagaaaacgttcccgcccgctccgcatccgaagcaatgaaagatctgcttatcgctggagacggaaaacgagggcgtgttttccccgtgaaacggacagagcccaaagtagttgcggccttgctttttcaattggacataatcacctatgacttcaacaatgtctgctgactgctgcacctgattaactacttcatctggtatgcggtttcccatcttataacactccgtcgtacattattcgatgttttgatttgaaatcccttcatcattcgacaggatttttttaagcagggtaacaaatcgattccgatcttctttatttaattttttaggtcctttggaatgaatgccgcttcttctcattttgcctgacatatgacggctcatcagagcgaagtcaatcgtgtcttcagtataagaacggcccctttccgataagacggcaatatttctgttcagcaaaagagatgctaaaccgatatcctgcgtgactacgacgtctcccgatctcacatggtttgcgatatataaatctgccgcttctttatgaggatcaacgtatacccagttctcgtctttgcttctggaaagctggtagtgttcaaatgatgcgacgaaaataacccgaacgctgaattgcgatgcaatgagcattatttcctcttttacggggcatgcgtctgcatcgacaaaaatcgtcttttctttttcatttagaagactaattctccatccctccatcaatctcctgcataaaaacaagcgaaatcgcatatgctccatgactgcggatctattttgagctttgtcgaaaaatttccgggagttattcttgacatcttacccataatagtttattcgtatcacacgaagcttaaacctaaaaataaacattttatcacaattttttattataatacaaacttcgcgaagatgccatcctttttgtttattccctatttgcatacccaaaaacccaggataaagcgtcctgagttatcggccctttgttttgagatgatgaatgatgttcgctgtttcttcgactgctttattcgaaacgtcaacgacttggcagccgatccggtccacgattttctcaaaatactccagctcttctttaattctgttgatattggcgtaaatggctttgtcatttaagccgagagattttaaccgttctttacgtatatggttcagtttatcagggctgatttttaagccgatgcattttttcggatcaacgctgaacagttcttccggcgggtcgacctcaggaacgatcggcacattggccactttcagacgcttatgggcaagatattgtgataatggggttttagacgttctggatactccgagcaggatgatatcggcttttaaaatgcctcttggatccctgccatcgtcatatttgacggcaaactcgatcgcctcgacctttttgaaataatcttcatcaagctgccggacgcggcccggttcatatttggcggtcaaaccgtaagccgattccattttatcgatgagcggaccgataatatcgtaatacagcacattcgctttttccgcttgttcaaccaggtatttgcgcatttcaggaacaacgagcgtaaaacaaataatgccgccgtccgctttggcgagagacacgacttcattaatggtgccgatatcttccacataaggtattcttctgatatgcgtatcatcggctgagccgttaaactggctgagcgaggcttttacaacgagttcggcggtttctccgactgagtctgatactacataaatgatgcgattgtccatgttatccccccgttagttttcaagcttatatgatttcattttctgataaactgacaagtatcttagtcatattcgttttggtaaaccggccgatgacctcaaagcctttatccgtatctttaataacgggcagggcatcgatctgtttttcaattaaatacttggcgatgtccatcacataatcatcacgccggcagacggcgatattcggcattcttgtcatgataatatgaaccggtattgaggcaagttcctgctggccgatgctcgcccgcagcaaatctttgcgtgacagcacaccgactaagacagcatcacgatctacgacaaataacgtgccgacatcttctaaaaacatggtgcagatggcatcgtataccgagacattttcattgatgacaacagggatcgattgaaaatctttcacttgcagctttttcaatttatccgcaagcagctgatttcccgttttccccgtataaaaataaccgacccgcggacgggcctctaagaagcctgacatggtgagtatggccaagtccggccgcagcgtggccctcgttaaattgagctgttctgcgatatgctctccggtaatcgggccgttttcctttacaatctgtaaaatttgttcttgccgtttatttaattcgatcgtactcaccacctttatggaagggtttctttatctatgttttcattctgtgatgtttatgtaaaaggggaaaagacgattgccgatcacacagcaaccgtctttttctttattttacaataagatgattcatattagcaaaagacttgatcacatctgcaagagcggtcatttgcgctaaacggttggtttttaatgcttcatcgtccgcatttaccatcgtgtgattaaagtaatcttcgatcggctcttttaatccgctgagcacggcaagcgcctgttcatagtttttggaggcaaagctttccgcgacactgtcttttgttttttcataagcgtcaaacagctttttctcctgttcattttcaaacagatccggcttgatatcgcggctctcgccttttttactgatggagataacccggccgagtgattcagccgtttctttaaagccgggtgtgccgaggtgcttctcaagcactcttgccttatgaacggctgcatacggctcaagctctgtgctgtccagaacggcatcaataacgtcatgacggatgtcttcagcgtttaatacgtatttcagacgctgtgtaaagaaatcaaggagctcattctctttttccgtttctgtcaacgacagcagttctttaaaagaaatgccccagttgcggtcgatcagaatggaaacaatgccgcttgcctgacggcgcaatccgtacggatcctgagaacctgtcggaattacgtcaatgctgaagaaggaagcaatcgtgtccagtttatcagctaacgccacgaccgcgccgataaaggttgaaggcacttctcccccggccgctctcggcatatagtgctcattgacagcggcagcgacggcatcatcttcaccgagcatgcgcgcatatttttctcccatcacgccttgaagctcagggaactcatagatcatatgtgtaaccaggtcaaatttagaaatctctgcggcgcgcttcacaagtttttgcgtctgttcatccgctttcaggcggacggcaagtttgcccgcaatggtgaccgctcttcttactttatctccaagggagccgagctcttcatggaaaacgatattttccaatttcttcacgttttcatcaatgttcagcttttggtcttctttgtagaagaacgcagcatctgaaagccttgctctcagcactttctcgtttccgcgggcaacattttcaattgcatggctgttcccgtttcgcaccgtaataaaatgaggaagcaaattcccgttttcatcttttaccgggaagtagcgctgatgctctttcattgttgtcacaagcacttcttcagggatagaaagaaactcggattcaaaagatccgtaaagcgccgtcggatattccaccagatggttgacttcgttcagcagatcctcatcgaccggaatgttccatttcttcttggccgcaagcgcatccagctggctttggatcatttgtttgcgttctttcgggtcagcaatgacgctttgttctttcagcagcttttcgtatgatgacggcgcatcaacagatacttcttggccgagaaagcggtgtccctgcgtgttccggcccgtcttgacatttgtgatttcaaacggaatgacgtcttttccaaagagggcggcaatccatttgatcggacggatatagcgcagatcctgcgtgccccagcgcatgtttttcggaaaatgcattccggcaatcaaattttccagttgcggtaaaagtgtcttcgtctcttgtcccgcctggaatttttgaacgaagacatattccgtgccgtttacatcttttatatacaggtcatccactccggcgccttggccttttgaaaatccgatagcggcttttgtccagtttccgtcagcatccagagcgatttttttcgcagggccttttgcttcttcctgaatatcagcctgtttttctgctacgtcttttatatatactgccagacgtctcggcgtattaaaaagtttcacttcgccgtgggcgatatttttttcagcaagccagccggtcagcttttcaccgagctgcaccatgctgtcatgtaaaaaccgcgccggcatttcctcgagtccgatctctaaaagcaagtcttgtttactcatgggaagagccctcctctttaagcattgggaaccctaatttttcccgttcttcataatacgtttttgccacttttctcgctaagttgcggacacggccgatataacccgtccgctctgtcaccgagatcgcgccttttgcatcaagcagattaaatgtgtgagagcatttcagcacataatcataggccggatgcacaagcccgttatccatttgtctgatcgcttctttttcataggtgctgaacaaatggaaaagcatatccacgtcagatgtttcaaaagtataaacggaatgctcatattcagccatcataaataaatctttcacagtaaatcctgacgtccattcaagatcaaagacgttttctttatcctgaatatatgacgcgagacgttcaataccatatgtgatctcaacggacaccggcttacattcaattccgcccacctgctggaaatatgtaaactgagtaatttccatcccgtcaagccatacttcccagccgagacctgcacagcctaaagacgggttttcccagttgtcttctacgaaacggatatcatgttcaagcgggtcaatgccgagcgcacgcaatgaatcaaggtaaagctcttgaatgttatcaggcgacggcttaataatgacttggaattggtgatgctgatagagcctgttcgggttttcaccgtaccgtccgtccgcaggccgtctggacggctcaacgtaagccactctccacggctccggcccgatgcttcgtaaaaatgtatacgggctcattgtgcctgcgcctttctccacatcatacgactgcatgagcacacagccttcattcgaccagtgcttctgcaaggttaaaatcatatcttgaatgttcatttcaagcacctccactttctccattcttttacaagtgcggcggcaaccaaaaaactcccgtctctatgcttgccggccgcaaacatagggacgagagttctcccgcggttccaccctagttgctgaggatgtgaatcactcagcctctttttaaagggttgctcgagaatgcctttcgttgcgcgctcatccttagcttacactgtcctaaggtcgcttgtatgagttggacgcaagtacttctttctgtcactgcaacatattttataataaatgatcatataaaaagatgggcagaatgtcaacttttgttttcatccaaaaggttcttcatgctttccatctggtctaaaaaccgttttgactttaaataaagtcctgaatattcctcgtaatacagatcaatgacctgtttaatttcgtttttggtttcctgttttaacgagacgctgccgagccttccgatatcaaagtaataaaaaagccttagcagccttgccgtttgcggcgaaatcggaactctgtacggatccttttcaaagcagcggtggcagataaaaccgttatctcttatcgaaaaatgaaacgtcccttccccgcttttgcagtggacacaatgattcagctccggatacagccccatgacgccgagcattttcatctgcacgatgaatgtgatcacgtccgggtcagtcccgtcattcagcctcttaaaggattcgagaatcaattcgaataaataggggttcggtttcttctcttccgttcctttgtcagtgagttcagcgataaaagcggcatacgccgtcaaaaataaatcttctctgatcgttctcatgctgagaatcatttcaccctgctggagcgtgccgagtccggatgttctttgcattaaaaatgacccgtacaaaaacggctggctgactgctgacagccggctggctgacttcctggcgccccttgccatgacgccgattttgccgtgttccctcgtcagcaatgtcacgattttattcgtctccccgtagtcattcgtacggagcacgattccttcacatttagtcagcatttccgcaccttccaacaacgggaggggccaagaggtttacaaaattggaaaatcaattcgggctagctcatcttccggttcttcgggtctttccaggttctctttttccagttctttaaaaagaaggtacgtatcaacacttcctgtttgagaaaatacgttccaggtaaaattcaacacaaaaaacccacctttcatcattaaactagcttgccaatccaaattcttacccttatcttgacctgatgtcctccttttcatgttaaacaaattttgctaacgaagccctgtttctgtgaggtaatcccacacatcaggcatgcgctttagatgaattaatattcatcctctttgaagccgaaatcacgcagctgagacattttattccgccagtccttctgcactttcacccataattcgaggtaaacgcgtgaacccagcagcgcttcaatatcagcccgcgctcttttgccgacttctttcagaagcgctccttttttcccgatgacgatgcctttttgagaatcccgctcaactacaatggtggcggcgacatggacggagccgttttcctgccctttaatggactcgatagcgacagcgatgctgtgcggcacttcttcccttgtcagatggagcaccttttccctgatcagttcagaaataatgaaccgctcgggatggtcagtcacctgatcgctcggatagaattgaggcccttccggtaaatacgcttcaacctgcgcgagaagggtttcgacgttgttcccttccaaagctgagatcggcacgatttctttaaacggatagcgcgcacggtactcatcaattaaaagaagcagctggtcagggtggatcttatcaattttgtttacgatcagaaagaccggcgtggacgtctgtccgagcttttcaatgataaactcgtcgccctttccgtacccttcttcggcgttgatcataaataacaccaagtcaacttctttcagcgtattctgcgccactttcatcataaagtcgccaagcttgtgcttcggtttgtgaatgcccggtgtatcaataaaaatagtctgcgacgtgccggttgtcagcaccccttggactttatttcttgtcgtctggggtttgtcgctcatgatggcgatcttttgaccgatgaccctgtttaaaaaggtagactttcctacgttcggtcttccgatgatagatacaaatcctgatttaaagctttcgttcgtcatgtaaatcctccgatgaaaatgcgcccggcaataattcttccgcagtcatttcttttatttgtccttgtaagttggtcagaataacaagcatatcctttgagcacagctcggaaattacttgtctgcaggctccgcacggcgaaaccggtcccggagtatccgcagccacggcgagcatcgcaaattccgtatccccctcggaaacagctttgaatatcgccgtgcgttcagcacagttgcacatgctgtatgccgcattttcaatgttgcagcctctgtacacttttccgtctttggtaagaagagcggctcccactctgaaatttgaatacggcacatacgctgtgtcccgtgcttttaatgcttctgcaatcaattcttgtctgttcatgtgtacttaattcctctcttacctttatcctgtatgataccgctgtcacttttattttacataattatgatcggtttttcacgcccatttttggcaatgtaaaataattgtaagaatcttctgctaacatatcttcggcaggaagatgagtaaaccaatgatacacgatatcacggcaaagacgcaaacggctccggcggccgcgtcctttgccgcttttgcgagcgggtgatactgatcagtaactaaatccacaacatgctctatcgccgtatttaaaagctccaaagcaagcatccctccgatcagcaccaaaacaacggcccattcggctgtgctcagcccggtgagaaaaccgcaaacgataacggcgcaggccgcggtaatatgaaattgaaaattccgctctgaccgcgccgttttccagattcccctccatgcatggacaaagctcttcaggaacctgctccactcgtttttatgatctcgtgagtccatactcatccagcaaatccttttgctttgaaaacatttcttcctcttcttcttttgtcatgtgatcatagccaagcaaatgcaaaaagccgtgcacggccagaaaaccgagctctctcataaacgaatggccgtactcttccgcctgctctttcgttctgtctgcgctgatgataatatctcctaaaacaggcggcatgtcggcgcctacgatttccacctcgtcttcgccttcttcttcaagcgcaaacgaaatgacgtcagtcggagtgtcttttccccggtagtctctgttgatttctctgatttcttcatttgtcacaatcgtgaccgatacttcagcctgatcctgaacgccttctttttccgccgcgaattggagcagcttctccacttcttggagcgcatcagctgagacgctgttcgtttcatcaacaatatctatgagtaaacccatttatttcaccttcttcgtagcctccggatattcaatccgggagtggaaaattccttttaaagtcgcacatagtgttttggcgatcgtatccagttctcggaacgtgagatcacattctgagaattgtccgtcctgaagcttatcggatataattccccgcaccagtttttcgatccgctcgggattgggattatgcatggaacggacggcggcttcaacgctgtcggccactgagataatagccgcttctttcgattgcggcttcggccccgggtagcggaactctttctctgtaatctggtcgcccttttctttcgctttataataaaagaattttaaaagggacgttccgtgatgctgctccgcgatatccacaagctctttcggaaacttatagcttctgagcatattcgcaccgtctgtcgtatgtgcgataatgatatttttactgagctgaggagacagcttgtcatgcggattatccatattcatctgattttcaataaaatattgcggacgtttcgttttgccgagatcgtgataatatgctccgacccgtgctaaaagaccgtttgcccctacggcttcacaagccgcttccgacagatttgccaccatgacgctgtgatgatatgtaccgggtgtttccgttaaaatctttcgaagcaggggatgattcggattagacagttcaatcagcctcatcgttgaaagaatgccgaatcccgtctcaaaaaacggcatcagaccgataatcaaaacggatgaagcaagtcccgagacgacccccatcagcatcagcgttccgatttcaacaggtgacagcgccgtattttgtattaataaaagcgacagcacgataatcatattaataaatgagacgaacagtcccgcctgcaatatttttgatctcgcattgtgtttccccaaaaacagaatgcctgaaatgctgctgattaaatagtaaatgccgatgacgtaattaaatgttcccgtcacaccctgattaaacatcatactgccgcagatcgccagaatgatgcttcccaaaatggcgagcctttcattgagcagcagcctgattaaaatcgcgccggcggcgatcggcacaagatagccgatattggtgtattcaatcttctgaaagagactgacgacttccataatgacgagaataagcgttgtaatgatagaaaacagcaaaagagatttatttttcagcttaagctcctgctgctgtttctcaaaatagtagacaagcgtggcgataaacagcccgatcatcagaagcagaccgctgatcggctttaacaggttggaattattcaaaagccccgtcagttcaagcttcctgtatacttcccggtcgatcaggtcattctcttccacgagaacctgtccctgtttgatctgtaccggctggacgctgtctgacgcttcctggcgtttttcatccgtcgctttcggatcaaatacgtaattcggaatgaccgcgtattttccgatttcagtcgcagccgctaaatattttgacggcacagaagcgcttttcagctcttttgcgaccttatccttcgcttcggcaagcttttcagaaggaatttcactgctcatcaccgtattcaccgcggtaatgacggaatccctcacaaatgagaaatcttcattgtttgcatggagaagcgatttaatggcatcttccgagacggattcattgacatcctgtgtcagcttgtttttcaccgatttgaccaatgatttttccgaaggtgactttttgtctttttccgcatcttttttcacttcgccgatgctgtcaaaaatggaagtgatcaggtcaagccggttgtcggtatagccttttttcagggtgtattgatcttccaccgcatcttcggccgcctgttttttcgattccgtcgcctgctgatcttccactgtggcgggcgcgtaaatcgtcttatcactgactgaaaacaaatccaaattaagtgattcaggttttacatgaataaagagcaaaccaaacatgatcgctgaaagcagcaggtacagcagcacatgggctgagcgggcatgtctgaaactgcggaaccgttcccgggcgcttttgcccttttccttctttttcaaaacaagaacctcctccctgaaacatcaggaacacatcatataaaaatgacccgataacgggagatcgggtcatttttgcattacttttgcttatcataagcttcaataatttttgcaacaagcggatgcctgaccacatctgtctggtcaagttcaatcacggagatgccgtttatgtccttcagcatatccttcgctactgcaagtcccgatgtgacgcctttcggcaggtcaatttggcttacgtcgcccgtaatgatcattttagagccaaaacccaatctcgtcaaaaacattttcatttgagcgggagtggtattctgggcttcatcaagaatcacatacgcgtcgtcaagcgtccgccctctcatataggcaagcggggcgatttcaataacccctctttccataagacgctccgtatggtcgcttccgagcacatcatggagcgcgtcatacagcgggcgcagataaggatctactttttcctttaaatctccgggcagaaagccgaggctctcgccggcttccacagcgggtcttgttaaaatgatttttttaatgtggccgttttttaaagcatgcaccgcttttacgaccgccaaataagttttgccggttcccgccggcccgatgccgaacaccatgtcgtttttcttcatcgccgccacatattctctttggccgagggttttgacacggatcggtttgccttttgccgttttcgttatttcctcttcatacatgctttcaaaatagtccagttcatctttttttgccattttcacggcatacagcacatcacgttccgaaatctcgatccccttgcgaattaaagtaaggagcgagcccaataatctgtcagcgatctcaaatgtttcatcattcccggaaacgtaaatggtttcaccgcgcgtgatgaggctaatgcccagatccttctccattaaatgtaaaaaggcatcttggctgccgaacaaagaaagtgcttcgtccgggcttttcagtttgtgattaatcgcaagtaaatgttctgccattctttagtctccctgaacaataggtgtggtttgaacgatatcttctataacttggtagagaataatcaactttactttaccattctcaacggattggtgcaaaactttttcactttccacctctccgctgccgtttaatcgcttttctacatcttgtcttcccattttgataccggcctgaaccgcttcgcctttcgtataagtccgcacggttgtttcactttctcttgtctgttcttgaacgtaagaaatcggaagcttcatccccagaaattgaaacgggtgcttttcttcctctgttttcggatgtttcagcggctcctcattaaattcaaagccccaaaaaggcacgccccatgatccgaaagacagcttgtgcttcgtccttactttacccgtatatagcgtaaatgatgtttcaagaggcacggttacttctgacttgtaccatgtttctccgtaaatttccgcttttgaggcgactttccgatcttcatttccgatcagtcctgagacgagaagctgtcctttgtcaacatgatcgttcacaaaagccatcggctgccccttttgcacgaacatccttttgatgaccgccttctttttggcaacgatatggcgggggctcacgtacttttcttttgtcggttcgtttttttcgaccactttcatatgaagggctgtcccgttcaattccacaccgacccacgtaatattatcaatgccgtttgttaatgatttttgaattttctccggcgtcatcattaaaaattgcaaacgtccttttttcacaccgatttcttcaaggtgctttaccatctgatgctcggtttcgggcttggcccctttaatatcaatgtcccaaatcatgttggacaaaagaaacaatataacgaaaaacatcacaaatcccgcagtgaagcccaggtttaattttgatttgagaagcagaaagggaagaccctttctttttgtaaagcttgctttgcattcatgttttctgatgactcttctgaaagcatgtacatcttgaagctgaatcatcagcagaacacagtcttgcttttttttcaccgcaaagatggcgattccgtttctcgtgcattcattcagcaaccgttcaatcccttttcctttgacttccatttggactttacccgaaaaaaatgacagccatttgtttttcacattatttccccccggctttatgaatcgacatatcgtacgtgatctatcgtgccttccaaaagaatttcttcaggaaggattgccttaatgaccaagttttttcctgatatgatacattgcccctgcttgagcatcagcctgacttcttcttcgctgaacagcaggaggcctctgtgattctctatgtagatatgaagtctgccgaccatcgtaatccgaggcagatccatcataacgtccgggggaatttccaatgctcttgtcagccatgcctttacacgattctttctttgccccataaaaaaagaaccccctttcatctcatatgtatgatttgaaaaggggttctaacactttattttttaccgatgctccgcatggtccggtgcggtttttttgcacggggcggacccaaaacctcactgaatataatgccttgaaccgcagtttctttatttattttgagggctgatttcttcagagacgcgtttcgtgcgcgttgagatgtcagcttatgttcaagcccgttaaacatctgctccgtctccgctaggcgcttttcagcttcccttcttttttgctcaaaagggttctcttctgaaacggcaggcaattcttccgcttccggcttatgctctttctgcggctgtttttgatcctgcttttttgtctgattttcggggcgtgtacccggcggccgtttttcatctttgtttttcttgccgaatattgccgatataatgccgatgacggcggcaatgacgagcggatttgtcagaatctcgtgcatatagcggctccctccttaatagagaggttattgttggtcttcatcttgctggtcattcgtcagcttgccgatagaatccctcatgtccgtatccgcgtcgatattttttatgttcatatagtccatgacgccgatgtttccttcacgcagcgcttctgccatcgcaagcggcacttcggcttctgcttccacgacttttgcacgcatttcttctacgcgagcgcgcatttcctgctcttgggcgaccgccatggcgcggcgctcttcggctttggcctgcgcaatgtttttgtctgcttctgcttgatccgtttgaagaatcgctccgatgtttttgccgatatcaacgtcggcgatgtcaatcgaaagaatttcaaaggcggtgcctgaatccagccctttgccaagtacggtctgcgaaatcatatcagggttttcaagcacttttttatgattacccgaggaaccgattgtcgagacaatcccttctccgacacgggcgacaaccgtctcttctcccgctcctccgacaaggcgctcgatattggctcttacggtgattctggcttttgcttttacttcaattccgtccatggcgacacccgcgataaacggtgtttcaatgaccttcggattgacgctcatctgcacggcttccaatacgtcacgcccggccaggtcaatggctgcgcagcgttcaaatgtcagctcaatattggcgcgctgtgccgcaatcagggcattgaccaccctgtcaacattaccaccggccagataatggctttcgagctgatttgttgttgcggataggccggctttgtgcgctttaattaacggattgacaacgcggcttggtatgacgcgccgcagcctcattccgaccaaagtgaaaatgctgattctgactcctgccgcaagcgccgaaatccatagcatcaccggtacaaaggtgaagaatatggctaacacgattatggcagctgcaactattgctaaaatcgccaaacttgacagttccatctaattcctcctcaaggttatcatctatatttctctcacgacaatgcgtgagccttccgctttcactactttcacctgtctgtctttttcagtgaatgatccttccgagacgacatccagacgttcatcatcaataatgacggtgcctgacggtctgagggctgtagcggtaatgccgactttccccaacagctccgtccggttctgatttgaaacataaccgctctccgtgcttgttgaatcagttaatattaattttttaaagaatttcattcgtttccccaacacccttgttaatatgataaaggctgtaatagacacagcaatggcgatcaagagagaaaccgccattacggtaaagctgcccgcagcgagaaagaggctcgcgatgacgcctgcaataccgataagaccgattatgcctccgggcagaaatatctctaaaaggataaaaaccaagcccgcgcaaaataagaatacgctgtcatagccggcgaatccggcagcgatatgcccggtgaaaaacagcagcatggccgtcagtccgacggcacccggtattccgaggcccggcgagaacaattcaatggtcaaaccaagcaaagcaagcgttaataagacggggacaacaaacggatttgtcagccatctgcccaatttgccgacaaaaccttcttttgcatggtgaacatccgctttgtcaaaaccgagctttgtatataaagcatcaaggtctgaaaccgtgccctccgaatatccgacttccttggctttttcagctgtcagtgtcagcagttttccctttggggcgcccgcttcctttgcattgatggcgggatctgccatggccagggcgtatttcggatttcggttgtttttaaccgctgcgtcctccatttctgcatgccacagtgattgagcctttttgtccgccgcgtttccttttccgtcgatgatggctgcggcacccatttttccgcccggcgccatatagatttcatctgcctgaagcgctatatacgctccggcagaaagcgcccgtttattaacgtaagcggtaacaggcacatccgcgcggccgatgatatccgcaatatccaaggctgattgaacggcgcctcccggtgtattgatgtcaagaataatgtgtgacgcgccggactccttcgcttctttgaaagaacgcgataaaaacgaggcgagcccctgttcgacatttttctcaaccgggatgacataaaccgatgggtgatcagctttcgcgttcaattgaacccctaataaagataatacaaataagcccaatagagcaacagcaattccgtttttttttcggaacaaggcaaatataccctccttcccgtttcgttcttctttatatacgtaacaaatgtactttagtttcatttttttatgtataaaaaaagacatctctctaggaaagatgtcttttttcttgtcaattaagataattgactgctgacaagtctgttaattacactgccgtcagctttaccttttactttaggcataatagcactcatcactttgcccatgtccgctttggagctcgcaccgacttcagcgatggtttcatttacaattgtctgcagctcttcttcagaaagctgcttcggtaaataaatttctaaaatgtccagctctttttgaactttatctactaaatctaaacgatcagcgtttgaaaattcatggagggagtctttacgttgcttaagttcacgagataggacagtaagttcctcatcctcggtcaaactgtctttcttaagcttaattgcttcgttttgaagtgaagctttcaccattcgaacgacagtcagtttgtctttctcacggcttttcatatacagcttcatatcttggttaagtcgctcaagaagactcataaatccaccctcttttagaatttgcgttttctagcagcttctgactttttcttgcgctttacgctaggtttttcataaaattcgcgctttcttgcttcttgcaaagtacctgtctttgatacactgcgtttgaagcgacgaagagcatcttcaagcgattcgttttttctaacgaccgtttttgacattctctttccctccctccgaatacaccaatcgactacctttaaaaagatacatatataaacatgtactttgacattataatataagccatcagtcaggtcaactaagcgagctcacttttccgtcatgaataaggctgcttgtctatataatgatggaaaggggtgtttcgtttgataatactgattctctttaccgcacttatcctggtttttttactcggaatgagcctgctcaggcagggcctgatcgcattaacgtattcaaaaattgagaaaagcctgctcttatttaccgaccaccctttgaaagcttttctcataagcatcgtattcaccggttttcttcagagcagctcagccttcatggtcattgtcatcggctttgtcagcgcaggcgctttatcttttaaacggaccattccgatgattctcggcacgaatgtcggctccacgtttacgacggagtttttagccataaagatggatgtgctcatttgggtgctttttatcggaggccttgtgtttatcctcatccgtaaatatccgttcaggcagatcggtataagcttcctcggtctcggcatcatctttttttgcatcacatgcttcagccggcttgccgttccgctgacagaaatgaaggcggggcggaggttttgcgccatgtgaatgattcgagctggtccgctctttttatcggcatgatattgacggcaatcattcattcaagctccgtctgcatcggcattttgatgagttttatgaacgaaggggtgatcggcattgaacaagcggtcagcgtcgttctgggatctaatatcgggacatgcgtcacggccgtcatggctgctgtttcaggcggttatgccgccagacagaccgccggtgctcacgtagtgtttaatattctcggcgtgctgctcgtctttcccttcctgtctgcatcagcaggtattacggagcgcctgtctgatgatcccgcgcagatgattgcgcatttcagcctgttatttaacgtagtcaccgccttattgtttctgccgttcacacatttgttttaccggctgattgacaggctgattcctccgaaaccgtaaaaaaaccgatgcgggaaggcaccggtttttttatctgttatgaagacatgcgcatgtttcgggtcatttcatcctcaacgacgcggacgaattgtccttcgttatacggatagcccgctttttgaattttgactttgacaagtttgccgattacatcttccgtgcctttgaagacgactttcatgtaattgtccgtatagccgacgaacatgccgtcctcatcagactctttaaacgcctcttccggaatgatttccagaacctctccttcataatcggaggcgtattctttggcaagctggtcagacagcgcaatcagcttatgcacccgttcgtttttcacgttttcgtcaacctggtcttccattctggccgcaggtgttccggtgcgtttgctgtaagggaatacgtgaagctctgaaaacttatgttctttaatgaaccggtatgtttccataaattcttcttccgtttcacccgggaaaccgacgatgacatcagatgtgacggcaagacccggcagcgcttctttcagcttatttaaacggtccgcgaaaaattccatcgtatatttgcgtctcatccgtttcagaacggtgtttgatcctgactgaatcgggatatgaaggtggcggacgattttatcagacgcatccagcacttcaatcacttcatcagtgatttgacttgcttcaatagatgaaattctgatccgcttcagtccttctacacgtgtatcaagctcgcggagaagcttggcgaaattataatctttcatatcttcgccgtagccgcccgtatgaatccccgtcaggacgatttctttatagccggcatccaccagctgctgcgcctgtttaatgacttcttccggatcgcgggaacgaagcaggccgcgcgcccaagggataatgcagaacgtacagaagttgttgcagccctcttggatttttaacgacgctcttgtgcggtcagtaaaagcgggaacatccagctcttcaaacacgcgtgctttcataatattgccgacgccgttgatcggctgacgctcttccctgtactgctcaatgtaaccgagcattttttcacgatcctgcgtgccgacgacgatgtcaacacccgggatggccataatttctgccggagaggtttgcgcatagcaccctgttacgcagatgacgccgtcaggattttggcggatcgcccgtctgatgacttgacggctttttttatctcccgtgtttgttaccgtacatgtattaatgacatatacatctgctgtctgttcgaattcttttcgttcataacccgcatctttaaacagctgccagattgcttctgtttcataatgattgaccttgcagccaagggtatgaaaagcaacagttgccattactgatcacctcttaataactctgtatgataggaaactgcgcttaacgcgtaaagaggcgcagtttcagtccgtaaaattctcggtccgaggccgcataagacggcgcctttttctgaaagctgatgaacttcagactcagtcagaccgccttcagggccgaatacgattaaaagagacgaaccttgcggaaggcttttaagctccgcggcgaaagcgcccgtttctccctgctttgatgactcctcgtatgcaacgacacatttatcgacattctccgccatttcaagcagctgccggaacgtatgaacggttttcacttcgggaatttcattgcggtacgattgctccgccgcttccttcgcgattttcgcccatctctcccgctttttctttgcctttttgtcgtctagcttaacgacggatctggcgccctgaaaggggatgaacatactagcccccagctcggtccctttttggataatccattcaagcttatcgcctttcggaaggccgctggcaatcctgatttttaacggcagttcacggttttcacccgtccattcagcaatgctgcatgatatatgatctttagaaaccgctttgagcaggcataacgcttcatggccgtctttcgaacagcagattatccggtctcccgcactcattctcatgacgttcgctatatggtggacgtcttcccccgtaatttgaaaatcgggagtttcgtccatctcctgcttcgtgagctcgataaaatatcgttgcatacgctgtgacacctactaactgttattttttcgcgatgatgctgacccaatcttccatagacagaatttctgtgatggtaaagccggctttttccaacgcttcttttacttcctgttttttctggccgataatgcctgaagtaataaaatggcctccgtctttgagcaggtcatacgcctgtgatgtaaagcggagaatcacttccgccagaatatttgcgacaatgacatcatgttcgcccgtgatgccgtctaacaaattgttctgcttcacttcggccgtatcactcactttgttcaattttagattcagacgcgcgctttcaacagcgaccggatcaaggtcatacgcatgaaccgattcggcctcaagcatggcggccgcgatgcttaaaattcctgaaccggtgccgacatcaatgacacggtcgcctttttgaacgatacgctcaagcgcctgaatgcacagaacggttgtcggatgcgttcccgttccgaatgccatgcccggatccatttcgataatcagttcatcggtattcacgggtgtgtacgtttcccatgtgggtacgatcgtgaatttttcagaaattttcaccggatgataatactttttccaagctgtcgcccattcttcttcattaacttcagaaatggtgattgtgtttctgcctaaatcaatgtcgtacaaaagcagattatttatcgtctctttaatgccgtccaccgtttcgccgaggaaactgttaatcggcagatacgctttgacaatgacaccctcatcggggtaatcattggggtcgagctggtagatttccccgtaaacattctcacgctctttcattaaatcaagcggatcttcgatgacaaccccgctcgcaccagcttcatgcaaaatatttgagatgggttcgaccgcttcatgtgttgtgtgaatgctgatttcggaccatttcaaaactaccaactcctatccaatcattactcgcctttaaatgcgcgttttactttgtcaaagaaactcatttcttgttcatccggcaggtttccgctgacttcagcgaactcgcggatgatgtctttttgtttgtctgtcagattcgtcggtgtgacgacgcggacgacaatgtgctggtcgccttgtccgtagccccggacgttctgaacgcctttgcctcttaatctgaatttcgtgccggtttgtgtgccggcaggtattttcaatttcacttttccgtgaagcgtcggcacttccacttcgtctccgagtgccgcttgggcaaacgttaacggcatttcgcaataaatatcgtctccgtcgcgttcaaagaactcgtgggcgcgcacatggaatacgacaaacagatctcccgcaggccctccgtttacgccaggttcaccttgacccggaacgcgcagctgctgtccgtcatccacaccggcaggaatcgtgacattgatttttttccgttttttcactttgcccgtgccgccgcagtcagaacacttgtttttgatgatttttcctgttccttcacagtggtggcagactcttcggttaaccactttgccaaacggcgtgttctgttcgacgttcagctggcctgaacctccgcagtgcgagcacgtatccggctttgttcccggctttgcgcccgatcctttacatgtttcgcaattctcttcgcgcggaatttcaatgatcgtttcttttccgaaagccgcgtcttcaaatgacagggtcattgtatactgcagatccgcgccttgccgcggcgcattcgggtcacggcgtctcgtgccgcctccgaagatgcttgagaatatgtcatcgaaaccgaagccgccgaagtctccgccgcctccgaaaccgccgccgaatccctggttagggtctgtatggccgaattggtcatattgagcgcgtttttggtcgtctgagagcgcttcgtacgcttcttttacctctttgaatttttcatctgctccggattctttattgatatcaggatgatatttttttgaaagcttccgataggcttttttgatttcatcctttgaagcgctcttacttaccccaagcacttcatagtaatcacgcttactcatctcgcttcactctcccgaatttctcacataaattagattgtatcattttgaattatgttttttcaattccttttatcccgggcaagaaaaaaagtcaaagccaagagatgcctgactttgactttctgtctgttgaatcagaatatgctgtgtgttcttccgcctaaagccatgcgggaaagaacttattttttcgtttcgtcgtcttttacttcttcgtattccgcatcgacaacgttgtcgtccgcttttttgccttcagcgtttgctgcgccttcagcctgctgcgcttttgccgcttcttcataaagcttcatagaaagctcttgaacgattgtttgaagctcatcttttttcgctttgatgtcttcaatttcgtttttctcgatagcggctttcagcgcgtctttcgcgtcgtttgcttttttcacttgctcttcgtccactttgccttccagatcttttaatgtcttttccgtttggaacacaagctggtcagcttcgttgcggacttcgatttcttcttttctcttcgcatcagcgtcagcgttttcttccgcttcttttaccatgcgttcgatctcatcatcagaaagacctgaagaagatttgattgtaatgttttgttcttttcctgtgcctaagtctttcgctcttacgtttacgataccgtttttgtcaatatcgaaagaaacttcgatttgcggtacgccgcgcggtgcaggcgggatatcagtaagctggaagcggccgagcgttttgttgtccgcagacatcgggcgctcaccttgaagcacgtgaatgtcaacagccgtttggttgtcagctgcagttgagaatacttgagacttgctcgtcggaattgtcgtgttgcggtcgatcagtttcgtgaacacgccgcccattgtttcaataccgagagaaagcggtgtaacgtcaagaagaacaacgtcttttacgtctcccgtgatgacgccgccttgaatcgctgcacccagcgctacaacttcatcagggtttacgcctttatgcgcttctttacccgtttcttttttgattgcttcctgtacggcaggaatacgtgttgatccgccgacaaggataactttgtcgatttcgctcgcagaaagatccgcatcttgaagagcctgacggacaggagccattgtgcgctcaacaaggtgagcggaaagctcttcgaatttagcgcgggtcagtgtcagctcaaggtgaagaggacctgcttctcccgctgtgataaacggtaaagaaatttgtgtagatgatacgccggaaagatcttttttcgctttctcagccgcatctttcaaacgctgaagcgccattttgtcttttgaaagatcaatgccgttttcttttttgaattctgctacgagatgatcgatgatgacttggtcaaagtcgtccccgccaagacggttgtcaccggcagttgaacggacttcaaacacgccgtcgccaagttcaagaacagatacgtcaaacgtaccgccgccaaggtcgtaaacaagaatcgtttggtcttcgtccgttttatcaagtccgtatgcaagcgctgctgcagtcggttcgttgataatacgctctacttcaagaccggcgattttaccggcatcttttgtcgcttggcgctctgcatcgttgaagtatgcaggaaccgtgataacggcttttgaaactgtttcgccgaggtagctttcagcgtatgctttcagatgctgaaggataatagctgacacttcttgaggcgtgtagtcttttccttcgatttccactttatagtcagtacccatatggcgtttgacagacatgattgtgttaggatttgtgattgattggcgtttcgccacttcccctacttggcgctcgccgtttttaaatgcaacgactgacggagtcgtacggtttccttcagcgttggcgataactgtaggctctccgccttcaagcactgccacacatgagtttgtcgtacccaagtcaattccgattactttactcactttgaattacctcctgctatgtagttattgattcacttttaccattgaaggacggatgacgcgatccttcagtttgtagcctttttgcagttcttcgataacaatattgctgccgaagttttcatcctccacctgcatgacggcttggtgaaggttcggatcaaattcctgaccgacagcttcgatggcttcaacaccttctttttcaagtgcgtccatcagctggcggcggaccatttccataccttgcagcaagctttttgtctgctcgctttcagcttctacctgtaacgcccgttcaaagttgtcgagagccggaaggatttccgttacgacgttttgagaacggtatttctgagcagcttccatttcaaggcggctgcgtcgtttatagttttcaaagtctgcttgaacacgcaaaagcttgttttctttttcatcaagcaaaccctgcaattcatcaatttggtgctgaagggcttcttcctgacctgccgtttcttcatgctgctcttgtgaagccgcttgttctgcctgttctgtcacttcttcttgttctgctgcttcaacctgttctgcggtttgtttttcttctgacattgtgttcacctccctcaaatgctgtaaaaagatgactgaaaatgattgccaaaattcccttattcatcatacaaacttgtgaatgcttttgacaagtccgaagtcacgtgctgcagcaggctgacgactcttgaataattcatgcgcgtcggcccgataatcgcgattgatccgatctgcttcgtatcaactgtataggtggccgtgattaagctgcagttttccatttcttcgtagtcgttttctttcccgattttgattgaaatcccggcttttgatgactgaaacagcttcagaacatcctgctctttttcaattaaagataagagcgagcggaccctttcaatatcgtggaactccggctgattcagcatgttgatctttccgccgaaaaacaatttctcaacgtgggccgccggatggaatgtggagcggagcgattcaagtatgctgtcatagttggcgatatgctgccttaaatatgtgacaacctctttaaaaatgcgctcattcagttcgtccatcggcacgcccgctaatcgatcgtttaatatattgaccagtttttcaatatcggccaaatccactttagccgggaaattgatggtgcggttttcgacatgccccgtgttcgtgacgaggatggcgaccgccttatccggctggatcggaacgatttgaatctgtttaagatagttctcgctcagcgtcggcccgaggacaatcgatgtgtagtttgtcaggtcggacaggatttgcgctgatttttggactgttttttccagctcgaagattttttctttaaatatcgagtgaattaaatccagatcggtttttgtcagcttgacgggtgacagcaaatgatcgacataatacctgtaccctttttccgacggaatccgtcctgaggatgaatgggttttttcaataaagcccaattcctccaagtcagccatctcgtttctgatcgttgcagagctgaatgtaatctcgtctttttttgaaagagttcttgatcctacaggctgcgctgattgtataaaatcattaataatcacttgcaggatcaacagctgacgatttgttaacatcatcatcacccctgttagcactcaaggtcagcgagtgctaattctatatcaaaagtaacaaaccaaaagaaaaatgtcaattataactcacccaaaaaagcgccaaaaacctcatttcctaataatttgccctcatgcgttaatgcaaccgattcttccgtgtcacagatcaggcctttttcggttaaatctttgagaacatcgggaaacagttcgtcgaccgagcgtccgaatttatcgagaaaagcttgcttttgtacgccggacatttttctgagaccgaggaacatttcttcttcaatctgctcctcccgtgtcacctcgtgcgtgtcacggtaaggcagtcccttttcttcgatgagctgaatgtaatgtttcacaggcccggcgttgacggtgcgcgtgccgctgatatacccgtgagcgcctgcgccaaaaccgaaatacgcttcattgctccaatacgtcagattatgctgcgactcgtatccgggctttgcaaagttgctgatttcatattgacggatgcccgcttcactcatctgcctcatgaccgtttcatacatctcggcctcttgttcttgcgccgggagatgcaggcggcctttttgcattaaattataaaacaccgttttcggctctacgatcagcgagtaaacggaatagtgctccgcatcaagagacaaagccgttttgacggaattgtcaagatcggccagcgtctgacccggcaggccgaacatcaaatcgagactgatgttgtcaaagccgagagccctcgcacgttcaaaggaagtgaatacgtccttttgtttatgcactctgccgattttttgtaaaagctcaccttcaaaggtttgaacaccgaagctcagccgattgacaccggcatttttcatgatttttaatttttccggggacaaatcatccggattcgcttccgcggcaaattctacgagtccgtcagaaggctccagcacgcggtgaatggaatccatcaatttttccagctgggcgggtgagagcgatgtcggcgtgcctcccccgatgaaaatcgtgcggagatcagggcgtcccgtccgttctattgtatttatcatttccttttcgagtgagtttaagtacttatcgacaggctggctctgaataaaatatttattgaaatcgcaatagtggcagatatgctcacaaaacggaatatgaatataagctgatttcattttgaaacaccttcttctttacagaaagaagccgcagcgcgggactgcggcggcttccgttattttttcgggctgtcatccattttaagaacggccataaacgcttcctgcggcacttctaccgagccgacctgcttcatccggcgttttccttctttttgtttttcaagaagcttccgtttccgcgagatgtctcctccgtaacattttgcaaggacgtttttccgcatggccttaatggttgagcgggccacgattttctgtccgatcgctgcctgcacgggcacttcgaattgctggcgggggatcaattctttcaatttttcgacgatgactttcccgcgctcgtatgcgtaatcgcggtgcacgataaacgacagcgcatcaattttttctgcattcagcataatgtccattttgacgagtttggacggtttgtagccgatcagctcgtaatcgaaagaggcgtaccctttcgtgctggatttcagctgatcaaaaaattcatatacgatttccgcaagaggcatctcatatacaatgctgactcggttggcgtctaagtactgcatatcgataaagttgccccgtttcccctgacaaagctccataaccgctccgacgtaatcgttcggtaccatcatcgtcgctttgacataaggttcttccacccgctctattttctgcgggtcaggcatgtttgacgggttatccacgatgatcttttcgccgtccgtcatataaacgtcataaataacgctcggcgcggtcgtaataaggtcaattttaaattcccgttcaatccgctcttgaatgatttccatgtgaagcattcctaaaaagccgcagcggaaaccgaagccgagggcttgtgacgtctctgcctcgtattgaagagatgaatcgttcaattcaagtttttccagagcttcgcgcaaatcattatatttggctgtgtcaatcggataaagtccgcagtataccatcggattgagtttgcggtagcccggaagcgcttctgccgcaggcttaaccgcgctcgtgatcgtatcaccgacacgggtgtcgccgacgtttttgattgcggctgtcaaatagcctacgtcaccgactgtcaattcgtcagccggctgcgctttcggcgtgaagacgccgacttcgatgacttcaaactcttttccggttgccatcattttaattttctggcccggtttgaccgttccttctacgactctgatatacgcgacgactccgcggtacgcgtcataaagcgagtcaaagatgagcgctttcagcggagcttccggatctcccgcgggagccggcactttttctacgatctgttctaaaatgtcttcgatgccgatgcccgctttcgctgaagcgaggacggcgtctgaagcgtcaaggccgataacgtcctcaacctcttgacgcacacgttctggctctgcgctcggaagatcgattttattaatgacaggaagaatctcaagatcattatcaagcgccagatagacgttcgccaatgtctgcgcttctattccctgagccgcatcaacaacgagaatcgcgccttcacaggcagccaggcttcgcgaaacttcatatgtaaagtcgacgtgtccgggcgtgtcgatgagatggaatatatattcttctccgtcttttgctttgtatttcagctgaacggaatttaatttgatggtaattccccgttcgcgttcaaggtccattgaatcaagcaattgttctttcatttcccgctgggtgatcgccgatgttttttctaaaatccgatccgccaaggtcgatttgccgtggtctatgtgggcgatgatggagaaattccggattcttgactgcctctctaaacgcttttctttatctgtcacaatctatcactcctactattaaacgcaaaatacactagcttagattatatcaataggattgtaaacattcaattaaaacaagaaagagaaaagcttcctttaaggaatcatccgcttttctcttcatcaatgctaacggttcagtttcgaaacccactcatacatcgcctgtgccgagtccgtcacggtatttgaaagggtttctccggcttttgaaaacaggttgaaggtttctgcctgttccagctgtttttgtttttcttccagatctttcgccgtaacggtttgccccaaaatggaagcttctttttcctgtccttctccgccgccgagcgtgaatgctccttttaaggagggatctttgtatcctttcatatcaagcattccgctgtttgcctgctgcatgccgaacaatacgccgacaaacatgacaatggcgatcagcaggcatttgccggtaaaacggatcatttgcatcacctgatttctattgttttttcttctctcctgattgcgagctgaccttgtctgcatcccagtacagttcgctgaatacatcggccacggcatctgatgcgcgcctcagttcttcaagattgttatccacgccccgaattccagcagaagcgaccgatcgtttaaatcctggttgtacactccattatctcccggagagccttttgataaaacaccgacgcttaagcctgggtattttttctccatcagcttatgaagttcacttgcgagtttatagttttcttcaaaattagcgctttttttgccgacgacgatggcgaccctggcatagctttttcctttgatgtcggctgtcgtatttttcttgcggcgggaatcccggtgaatgtctatggtatattgcaggtttttatttttggcgagcgcgctttttacgaccggccttgattcgtcgtagcttcgcgcataatttaaaccgtctttgttcaggcgggcctgaatgtcggttttatctacggtcgctcctacaccttgcgcttcaagcgcttttccgaacatatctccgacaagcgtgacattggccttcgaatggcgggcgttatccggatttgtttccccttttaacagaggaagataggattcggtattatgagtgtggtaaataaaaacgacttttttgctgcctgttgaatgtttcggcggcgccttttcttcttttttcgttttgttttcgatttctgccaggttcacttctttttctttttccatcacctttgacggcggcggggattcagcaggcatattcgtataatcagtcccctgccccgccagaaggatctccgtatcgtattgggcaaatcccggcagctcacgtcccaagaaactccgcgggtcttccatattaatgcttgtcgccagttttaaggaaagccgggacagctgaaaagagtctttttcaggaagctctgaggcgaaataatgattttccataccgaggaggtgtgcaaacgcgtcacccggaagttctccggcaattccgtgaagagaattcgaagaaagcctcagttcagggcgaagcgatgtgagcacacccgataatacgaaaataacgataaggcttgtcataaacaaaaacatgcccttgagcgcatttccaccgtttactgcaacgacaatttgacggtttctgcgtttttttctcatgatttgaatccctccagcgcttgtctagtaattactctatgaacaagctagaggaggtagaaccattttaatgattataagaacctttgttatcttgtgacactttttcatgaagggcggtgtttaacccgtttgcaagcacgttcgccatatcatcaataaaggtgtcaatctccttcggtgtgaccatcagattatggccgagcggagagagcacttcgtgaatcagctggcgtttttcgttttcgtccagtgtgccgacaataccgagaaaggattggcgttctttttctccgggaaggtcttcgtctgtcagcaccttctttttgccgaagttcattccggcgggcaccagagatcttgacgggctgtcatctttcatctctctgccgaaatgctttaatatataatccaccgtatcgctcgcgatcgtaaccgcatcaacgacagtcggtaccccgattgcgatgacggggatgccgagcgtttccttgcttaattcttttcttttattgccgacgcctgatcccgggtgaatgcccgtatcagaaaattggatggtcgtgttcaccctttcaacggctcttgccgcaagagcatctaccgcaatcacaaaatccggctttgattctttgatcacaccttgaataatatcgctcgtttcaattcccgttaatcccatcacaccgggagcaagcgcgctgaccggcctgtacccttcctgcacgttttccggctgaagcctgaacagatgccttgtcacaagaaggttttcggtcacgagagggccgagcgcatccggcgtcacattccagttgccgagaccgacgatcaaacagcttgcatcctttggaatctttaatgccgacagataggcggaaaattcctcggcaaacacttccgttactttttcctgcatgtcagagtcgtgttcccgaaccccttgagcctcgatcgtgacatagcgtccctgctttttccccgatagctcggcgccttctttggtaatatcgacggttctgactttaatgccgcccttgtcgcgttctttttcaataaacccgtttatttcttttgtctgaccggcttgtccgtcttttaccgcctgtttcgtttctaccgctaaatccgtccgtatcagaaattgattgacatccagttcgttgtttttcacaggaaagacctccttcaatcatcgtggtacatagtgtggccatttacaaaacgaatcatgcgaatttacccatcaacgaaaaatactttacatttatattgcaatctaaagttctgtttgatagaatacaatttgttctattgtgaagaagatttaaccttaagacactgtgctacaggttgtatcttaggaggtgaaacacatgccaaacattaaatcagcgattaaacgtacaaaaacaaacaacgaacgccgcgctcataacgcgacaatcaaatctgctatgcgtactgcaatcaaacaagttgaagcttctgttgctaacaacgaagcggataaagcgaaaactgctctttctgaagcagcgaaacgcattgataaagcagtgaaaacaggtcttgtacacaaaaatgccgcagctcgatacaaatctagacttgcgaaacaagtgaacggactttctgcataatacaaaaacgatccctttaacggggatcgtttttttcattcagtccggagaagctcaaggagaaagagctccagcaagagctgcttgtcctttttccccgttttcatttcataatccattactgcgagcctttctataatacgccgcagctcttcttcagaaaatagcctcgcctgatccatcgccagctttacccggaaggggtgcacctttaagttggaagcgatttgcttttggccgtatccttgtcccgcaaaatactttgtctgcataatcagacggaattggttggcgatcagcgccataattttgatcggttcttcgttttgttttaaaagatcataaaatatttgaagactttccgtccgttttcggttcacgattttgttgatcagctcaaaaatattctgctccaaacttcttgcgacaagctcccggacatcttcaagcgtgatctcatgtctgtcaccggtgtaggcggagagtttttgtatttcctgatatatggaagacagatggccgtttgcaagcagaaccaaatgctcggcagcttctgtatccatcgttttattttcggatttcgccagattaatcgtaaaatcagtcgtctcctttgcattcagctccttagcttcaatcataagggctttttgcttcagcgctttcgtcagctttttccgttcgtccagcttttcatacggagccacaatcacaaagaccgtataaggcgcaggctccttcaggtaagtctccaaagcgcttgtattatgctctattttttctttctttttttcccctgttaaaaaagacggattttttacgataaccagccgcttctctcccataaacggaaacgtttccgcatcggttatggcctggtcaagcggatcctcttcaagatcaaaaacagacaggttaaaatctttagtctcctcatcaacgacagcttgtctgatccggctgacagtctcttggagcagatacgtttcttttccgtataagcaataaacggagcggacatccccttttttcagggctttccaaacatcaaataccatgatcgtatgacttcctctctttcttgatccccttctatcctaaattgagttcggcaaatagtaaagaggaagctttaaaaaggacagcttcctcatttataataaacgcctgattcacaagctcccgggtctgcttgtaaaaaggcgataatcacaagaacagaaaacgttaccatcacttctagatttttcaaaacaattccagtatacttagggaagtcaggagggatgaaattgaatgattttgaaaaaaacgttcaaagcaaacgaaatgatgctgttgactcagctgtcggttttgtcgtgtccttcggatttttcgcctttttgttcgtgatggcaacagccatccatcttatcggctcttagccgcattccgggctgctgtcaatcggcagtcttttttacttcttgcgccctggtttcttctatatcatatggagggaagacggaaaacgttccggcgcctttttcaaatctgtattgaatcgttccgctgatatcggtgcgaagcacattgacagagtacgccttcaaacgatccagcacttcttcgtgcggatgatggtatcgattctcttttcctgctgaaatcagcgctgcttccggctgaagctgtttcaaaaaggcttcactcgttgagcttttgctgccgtgatgacccgccttcaatatatcagccttcagtttcggatacgttttcagcacttctgtttcgccgtccgattctaaatctcccgtcaaaagccagctcactccgcctaaaaccgtccaaagcaccagtgacgaatcatttttactctttccgtcagacgactccggagacagcacctgaaactgaagatcaccggctgtaatggtgtcgccccgctttgcttcggcaacgggaatgttgttttctttcgccatatttaatatgttctgatccttcggttcttttacgaatcccacggggacaattaaccgtttgactctatgatttttgattaacactccggcttccccgatgtgatcctgatccgcatgggttaaaatcagcgcatccagctttttcaccccttttccgtttaaaaacggaatcaaaaccttctcgccgatagaatacgggtggcgtttttctttccatgattctccgggataagcaatcactccccctgtatcaaccattacggtccctttgcggtgcggcgcgtttataaacagcgagtctccctgcccgatatcaagcatatccgcttctccccatgggctgaaatacggacggcatattaaataagccaaaaccgcgcagaaaaaaagagccgatttcctgagttttaaaaaacctcccttttctaaagccgcaaaaagcgtaaaaacggaaaccgcaagcagaagaagggaaagaaagtcaggctttaacacaatcatagtaaataaatcaacggatgccgcatatgtaatgaaatcatgcacaggcttcatcacaaggtcaaacatattaaacaaacattctcccatctgccttgaaagtaaaagaagaaggaaaccgatgacagaaaccggaatgacaaataacgtataaaatggcaccatcaccatattcatcggaaaactggcaagtgaaatttgctgaaaatgatagagaagaaacggaagtgagctgagctctgcaatgaatgaagccatcgcaagcccggcaagtctgcttttccctgctttctttaaaatggaggatgacagaattaaagaggcgcttaccgcaaaggaaagctggaagcccgcctgccaaaggaggtaaggattaaacagcaggagcagcagataagacagagacaatgcagcagaggaatgaatgccgcgtttaacaagagttccggcgatataaaatcccagcatgagggatgcgcgcaatacggatgggcggcaccgctcagcagcgtatacaccggtaaaaacagcagcagcaatatccccgccttttctcttgtcagcccgattctgatcagagcataaaataatcccgccgttataagaccgacatgcattccggaaatcgccattaaatgaacgactcccaaattttgatatgcactcagtatatcgtcttctatagaaaatctttcacctaaggtcagcgcttcaacaattccggcggaagattcaggcacgtgattccgaatgatcgaaatcaaattttttctgatgctcagcagtttaaacagcggctgtttggatttttcacactgctgaatggaagtcacggtaaataaccagtgaatctgctgagagtaaagatattccttataatcaaaacccccgggaatcgtcgcatgtgcaggctgttccagagagcctgtaaatgtgcagcgcatccccggttcaagctgttcaatgcgtctcttttcttcaagagaccggattttgtacgaagccgcccatttttccttgtcatgtgtacggataacggctgacattttcgctccgtcaaccttcggaatattagtgatgacggcctgttcagtataactgccggcctgataccgcgttacattcacagcgtcacaaaccgtataaagaaagaaataaacacaaaaagaaacgaggcagatgataaccggagcaggctgctttgtttttatcataataaagagaagatacagaagaaaaaggagcagaacccagaagacatgagcggcggcaatccccgcagttgcagaaaccgccgccagaggcagaagaaggtatttatatttcatttatacgtaactggtaaacagctcattggcctgttcatgaatttttttcagttcatctgccttaactcccgcatcagataattgctgaatcagacctgcgacaaaagacaatttttcgcggtttttcagatcgatgatcatttcatcaagttcgacctgctccaccttgactccggcttggctgaacagctcttttgcataaggctgtgttttgtaatcttcggcataatagaccgttttgatgcctgcctggataattgatttgcagcattgaatacaaggataatgcgtcacataaatttccgcgccctccgtcggaacaccgaacttagaacattgcagaatcgcattcatctctgcatgtatggtcctctggcaatgattatctattaaaaggcatccttcatcagcgcaatggacgccgccggcgattgagccgttgtatccgccagcaatcatccgcttatctctgactacggttgccccgactgacagtctcggacatgtgcttctcagcgccagcaaatggctttgcgccataaaatattgattccatgagattcgttccacaagtgttccctccaaaaagtcttgttgcttttctaagtttacatagatttaagcagaaccgtcaattcactttaccgtaatggaagtttttatccgctcaaatgacttttctccaaagcctgatacattcatcaaatcttcagcagtctgaaaccgtccgttttcttctcggtaggcgataatagcttccgcttttttctgccccaccccggaaatcgcctgaagttcgtccagagatgccgtattgatattgacagctgcattctccttttcaccaactgctgttttcgggcgattctcctcttcgccttcactcggaatataaacaatcgtcccgtcctgcagctgctctgctaaattaacattcaattcatccgcctttttcttcaggccgccggctttttcaatggcttgcgtcactctgtctcccgctttcatttcatacacgccgggatttcggaccgctcctttcacatcaatcataatcttatcgtctgcggtgtcttttttgtccgcgacggatgcggaggctgtttgaccgagcacggactgctgtttgaccggctcttccttttcagaacgaaacagccaaatacagataaaaaccgcacctgccgcaagacaagcgcccagaattttcaggttccgccgcatccgctccgtcatcatcgctttcgtcatattgcattgcctccccgcataaggtttagaggattaagggaaaaaggaggggaattcattgaaaataggctttatcggcaccggaaacatgggaacgatcctgattgaatcgtttatcgaatcaaacgctgccgatccctcacatatcaccatcacaaacagaacaatcgaaaaagcattaaaactaaaagaacgtttcagcggcatccacgtcaccgaggatcaggaaaagctcgtacaggataatgaaatcatattcatttgtgtaaaaccgctggatatatatcctttgctgaaaaaactcacaccgcatttacggaaagatcacattttaatctccattaccagccccgttcagacggatcagattgaacatacggttccgtgtcagacggcccgcgtcattccgagcattacgaaccgcgccttggccggcgtctcgcttgttacgttcggcaaaagctgcagcgagtctgcaaaagcggatattcaaacgctgttcactcatatttcaaaacctgtggaaatcagcagcggtattacaagagcggcgtcagacattgtcagctgcgggcccgcttttatgagttatctcgttcagcgctttattgacgcggcagtggaagaaacggacatcaccaaagaagaagccgtgattatgtcgacagaaatgcttgtcggtctcggaaagcttcttgaaacggggcattacacgcttcccgccttgcaggaaaaagtatgcgtaaaaggcggcgtcaccggagaaggactgaaggctctcgaaagcggtgttcaggatatgttcaatcgtgtctttcagcgtacacatgacaaatacgatgaagatatatcgttagtgaagaagcaatttcacgtgtaactgagtatgccataaagagctttatcacgccaatcgcaaaaaatgcattttaaaaaccatcgttccgtttaaacgatggtttttggtttgcctgccgtaaagaaaagacgttcagactctgttgaaggaggccggtctgtaaaatcagccgtcactttcttcaattcaaatccggtctctgcaagcatttgtttatattcttcaatgtaaaatgttttttgctcatgcgtctcgtcatagcggtcataagattgtccgttccatacgaaaaaggacatatcatggatgacagaaagctcttcatcgccggcaaagctttgccagatatagctgatctgctcatcctgatccgcatgggtgctgtccggaaaaagctccgtcattttatacggggaatggacgtcaaacagaagcaggccgccctccttcaaaacttgaaaaacacttttgaaggtgcttaagacatcatttttcgtttttaagtaatttagggaatcacagcagatgactacggcatcaaactgttcttcaaaaccggaaagctctctcatatcctgctggagaaaaagaatcggctttcctgtttttttctgctgggcacagctcagcatatcttcactcaaatcaatccccgtgacttcgcagcctttttcagcaagcctgatggatatttctccggttccgcaggcaagatcaagcacccttcccttttccggaagagacgcttcgatccagcccgcccattcatcatacggcgcatgggacattaactcgtcatatacaccggcgaagccttggtaaatcatgagttcaagccgagttcaagctctgcgagcggcgcgtcgccccatagcttttcaagattatagtagcttctttcatctttatggaaaacgtggacaatgacgtcgccgagatcaactaaaacccagcgggcctcatcaaacccttccatctttttgacatcaatgccgttttcttctgcctgatctttaatttcgcgcgcaatggcctgaacctgtttatcagaattcccgtggcagattaaaaagtaatccgctacaagtgagattccttccatgtccagcgctaaaatatcttctgcacgtttatcgtcgcatgcttttgccgcgatttttaatacggaagcttgattcattttccatattcctcctgtcgtttttgagacaccagccagttataggttgcaaacgtctccggaaagaccggctggttttttttcatcagaaatatcattgtatttttcatcgcttgtatgagcgcttcgttcagatctgtttccgccagacggcgcacctcttccactccgggaaaatggcggccgggttcaatgtaatccgcaacgtagatgactttgtctaaaagggtcattccgggacgccctgacgtgtgatagcggattgcatccaagacctcgggatcagtgatccccgcttctttctcagccaaatacgctcccacaggggcatgccacagctcggcattgtaatccaagagctcagcaggcattttttcccgcacgatgatctgcttcatttcttctttcggccggaatttcgcataatcatgaaaaatagccgccatttccgcttttttcggatctgctccgaaccggcctgcgagaataaccgccgtatctgtcacgccgattgtgtggatgtagcgatgctcggtcagctgttctttgacgcaggcaagtgcttcctcacgattcatataaatcattctcctctatatactgcctcactttatccggcattaagtattgcgtcggcttttttgctttgagacgttctctaagcatcgttgacgaaacgtcaaattccggaacgtcggcaaaaagcagcgggtacggggtctcgatatgataccctgggcgccgcactccgataaattgaatgagcgtgagcagttcgtccagtttgtaccatttcggcagatattcaatcatatccgccccgataataaagaaaagcttgtcgttcgggtgccgctccttcagtaaacggacggtatcataggtataagaagggcctttccggtccatttccgcaagctcaagcttaaagaaggaattagagctgatggcaagcttcagcatctccacccggtgccggctgtctgtaaagtcttcattctgcttatgcggcgggattttattgggcataaaccaaatctcatcgagctccgcctgatgaaggacttcattagccatcagaagatgtccgttgtgcggagggtcaaatgtgcccccgaatattccgattttcttcatgtcaaccaccttacggaagctcgatttgtttattttcctttgattccttatacaatacgatcgtatttccgatcgtctgcaccaattgtgagcggctgcctttcacaagcgcttctgcgacatcgtttttatcgtcttcgcagttttgaagcacgctgactttaatcagctctcttgcttctaaagcctctgcaatctgtttcaccatgttttcgttgactccgccttttcccacttgaaaaataggcgttaaatgatgcgcttttgaacgcaaaaaccgtttttgttttcctgttaacattgtgttcctcctagttttccttcaacaattgctctcattaagccgctgtcaggctcttgttccgtccacagcttgaaagacagtgcagcctgttccacaaacatgccgacaccgtcaagggttgttaaacctcttttttcagcttcttttaagaacgccgtttgaatcgggttgtatacgatatcacaaacgatggcgcccgttttggcccgttccaatgagagcggcacggcatccgttttcggatacatgccgacagatgttgtatgaataatgacgtcatattgttcaagctgattttcagcttcttttaaagtaagggcgcgtttctgctgaaaagagggagcagccgcaatcagactttccgctttttccggcgtgcggttgcaaacgtcaaattgtttcggctctctgcggacgatcgtcgtaaaaatcgctcttgccgcccctcccgccccaatcatgaggatggagagctctgatatcggtttgtccaatactttgactaaggatttataaaacccatctccgtcagtattatacccgatgagcctgtctccctctcttttgacggtatttacggccccgagtactttcgcgctttcatgtatttcatccagatgctccatgatcgcgactttatgcgggactgtgacgttcactccgcagatgccaagcgccttgattccgttaacggcgtccttgagataatgaggttccacctgaaacgcaaaatactgcccgttgatgttcttatcttgcaaagccgcgttatgaatatcgggtgacattgaatgcccgatcggatttccgattactccgtacaattgtttcatgctccctctccccttctctctatattaatgaacggcggacaaatacgtgtacgcctttcggagcgtatgccgttatttttttatctgcttgctgcaccgtgacccagccgagtccggaaaaaacgatatccgtctttccttctttaatcgtaaacgtgtgggccgtaagctccggaaattcatccaaatgatcttttccgggcggggtaagcagttctcccgcatgcttttcgtataaggcatcagcattttcaagctttgttctgtgaatcatcaattcattcggcatatagcagacaaacgccgttttatcgcctgatacatagtcaaaccgggcaagcccgccgaaataaagcgtttgtttttcattcagctgaaaagtgcgcggcttcagttcttttttcggtgtcagcacctttaagtcacgcttgtccacgtaatgcgccatctggtgatggttaatgattcccggcgtatcataaagcgcagatccgtcatcaagcgggatttcaatcgcatcaagcgtcgtgcccggaaattgagaggtggtaataatattctcttcccctgagacctctttaataatccggttgataaatgtggatttgccgacattggtacaccccaccacatacacatcccgcccttcgcggtaatgttcaatggcgtcaatgacttccttcatcccttgtccgcgggaagcgctgattaaaaagacatcaaggggttttaagccgtattctttcgcttcgcgtttcatccattggacgagccgttcccgctttacggatttcggcaggatatcggccttattaccgacaagaatgatcggattaccgccgacaaagcggttcagcccatttatccagcttccgttaaaatcaaaaatatcaacgactttgacaattagagagtcagtatcgccgattgtgtgcaagatatttaaaaagtcatcatccgttaatgaaacatcttgaatttcattgtaatttttcagtctgaagcagcgctgacaaatgacattctccttcgtgagcgatgcctttggcgcgtatccgagaccttgtttatcctcggtctggatcgttactccgcagccgatgcaaacaaccttttccattcctaatcctcccactgaatatggcctttacgtttcaaagaactcaatattctccgttcaatccggcggttaaagcgcgtcatgactccgtcagaggaagcgacaggcacgacgaggatcgtatgatacccgtttctgtttccgccgagaacatcagtaagcagctgatcgccgatgaccacacagtcttcttttttcagctccatgctgctgacagctcttttaaaggcgcgccccatcggttttcttgccttataaataaacggtatgccaagcggctccgagaataatttcactcttcgttcattattattggagacgatcgtgactttaatgccgtgctccttcatttcttcaaaccactcgattaatcgaggtgtcgcactcggtctgtcccactccacaagcgtgttgtcaaggtctgtaataatccctttcacattgcgttccttgagcttttccggtgtgatatgaaatatatttttcacaaattcgtcaggtaaaaaaaacttttttaacaaaacccgcacccttccttttctttctatcatctatatgtcgaaatctgtcagatttaaaaacaaagtcggactcggtaaaaaaatttcgacaaaaattgggtttcttcaccagttgtggataaaattacacacattatccactcttattacatccggatttatccagattataaacaagatactaacaagttatccacttacgagtgtggataacagaacgattgttcttatttgtatttcatggtagattaaagataacctcaccatgattgaaacgcaaccttccatcatatgcttgcgtctgatgattgattacaattgtaaggaggtgccactcccattaattgggtccccggcatgagaaagctttctgatgaattactaatagaatcttatttcaaagccaatgaaatgaatttgagccgtgaatttatcgagttaattgaaaacgaaatcaaaagaagatcgctcggacacattatttccgtttcttcttaaacagaaaaaattcccgggcgaatttcctttttttactcagatgactgatattatatcacttcggttatgcgcattactaccactttcaacaaaaaacacccctaaaatagaggtgtttaagaggacggctgctatatattgaaccaatacagaccgcccagaacgagaatgacgacgagcagcacaacaaaaaatgcgtaccagtaccccgcattcacccgaggaggcgggcatacaggatattgcggagggaaaccgcggttcatagcaatcgcctccaaaagatgttttttctacagcctatgaagcagaagcaaaacggtttaggcagctgacggcgtcagcgttccaaaacccgcccattttttatgccttcaattaagattctggcgccttttggcgtcatatgatttccggagggatctatcagtccggattggatcagcgcccggtctgtatctttgccgccgtccgcgcgtataaagtgtttccagttatccaccagcggcactttcaactcagctgcaacctgcctcgtaacgccgttataggaattatgccatgttctcgcgccgcctttttctttaaaggctgaggctttatatctcgaatagtaatagagatgatgcgttccgtttccttctataaccgggatgcacgtcattaaaatcggctttatgccgtgatttctgctttcgtttatgaaataagtcaggttttctttaaaccgtttctttgatactcgcggctgatctcccgtcaaaatgcccgcatcatttgttccgaacatgataaataaatattggggcttacgctccagcacgtcgctttgaaagcgcaggcgcgcatcctcagtcgtctggccgcctattcccgcatttataaccgtaagacggccgcgttccgctgtttttaaaatgtttacccactgctgcgccttcggataatcacgataatcccagttggaaccgcgcgtattgctgtcgccgaacgcgacaacacttttctctttgcccgcagcgcatcctgataacagacaggttatcgtaataaaaagaacagcaaacttcattttctctccccccaaaccttacctcctatggtacacatctctttggcggctttcaacgcggcgctctctttactggatatgaaaaggaccggaatcctgtccgatcaaatccgaaaccttaacaaacgtgtagccctgctttttcagctggggaatgatttctttcaaagcctcaaccgtctggcgccggtttcctccgccgtcatgcagaagaacgatatctccatctctggcatgtgaaacaacgtgcctgacgatttttccttttccgggccttttccagtccctcggatcttggttccatgaccacatgatgatatgatagccctcttttaagaggcttttgaaagccgtatgattcagcgaccctcccggcgggcggaataacttgtccccttccggctgcagcgatctgatatgatgcgcggagctgtgaagctcttgtaaaatgtctttgcgttttaaacggtgaaaataaacatggttcatcgtatggttgccgatttcatgcccttcttcaacgatgcgttttgccgttacggggtatttgtctatacggctcccgatacaaaaaaaggttgctttaacattgtgctgtttcagcacgtctaacacagcctccgtatagacaggatgggggccgtcatcgaaggttaaagatagcttctttttttcagaccttatatcccagtacacgtttcccgtcttctccatgtcacttctttttaaagatttcgcatcggcggacacggcagtgagacccgtgaggacgcatatcatgatgatcagatgaaagcatctcaacgtttacacctccagtaaacactactgttaacgtgtccccttttgtataaaatcattctctgcatcaaatgatgcacatcacccgcttcccgcatgtttttgtccaaacccggctgccagccgtttctcatcaaacggcaaatgctgataaacaagtacgcttatcggacagcttattttaatagaaggagatagatttgtgctgtatactaattgaaaagaggtgaacgtacagatgataaaaaagggattcagtcttgccgtcatcattgctgtcgtgatgatcggctttatgcaaaaagacgtctggctcagcatgattcgcgcgggcggcatgtatgccgtgcttatgagtatccttctggtcgcagctgacgtattttttccgatcgttccattcgccattatcgcggccttaaacggagcggttttcgggattgtaaacggagtgtggattacattgtcaggcgcaatgctcggaacaatggcattgttttttctcgtccggtacggattcagagactgggccagaaaaaaactggtggcttacccggccgcggctcaatatgaaggttcatttcatcagcacgcgtttacggcggtgcttttcgggcggctgattccgattataccgtcgcttgccatgaataccgtctgcgggctgagtaacatacgatggccgatctttttttctgcgtcggtgctcggcaaaattccgaacattgtgatcgtgaccgtcgcaggcgcttcatttacaagcaacaaactgctgtctttcgggatttacggaatgtatatgctcgtcttaatggcggtcatttataagaagtttcccggtcttttaaaaacaacgaaaaaatgaagcgcgtaccgcctcctattccggcggtacggctcctctcattctgagaacttttccgtttaattctaaattgatgcagcttcgttccgcgttctctttgctgctcagtaaaggtgcacataaccgattttttggctgcggtaaaagttgatggaagcttcaagctgtccgatcggctgcccgttatgaagaagcagcttaaaattgtcgggtgagcattagatttgggatgacagccacctgagatactcatcctcacgaaatgaaacggccgtctctttatgtttctttaaattgatccgcttgaaacacatcgggagtcctcctttttgaggccgcaaataagaacgagcataaaacggctgccaacgccagcataacagcagcccctgcgatgacgatgacgcggacggaagaaccgacagccgccgctccgaaaaccgccgttaccaatataatgaagacggcttcgactaatgaataaaagctccccactctccccatgatgtccaccggaacattcttttgataaaacgtcagaaagcctgtattggcaaacgccagaaaaaaagcgagaaggaaaaatccgaaagcagccgtccaaaaaacgtcagaaaacgcataaatcatatatccggccgctgtgaataaagagcccattcccatcaataaagaagccggcatttttttattaaagattacattgacaagcgcccccgcaataatgcctgcccctgagacactgacaagaaaaccgtaatcggcatcagtcagctgaagaacttcttttgaaaaagcggcttcaagcgaatcaagcgcggatggcataacggtcatgaccagactgaataaaaaataaatgatcatgacgtttcgcgccgttcggctgaagcgatagacgagcttccaatcttctttgcacactgccaaagaaagcttctgtctgggagaatgtacgtgaggctcattttcaaggctcggcagcatcatcgtgatgaaaccggacagcactaaagccgccgcattcacccaaatcgcaaaaatcggcgtgccggcgataaaaagcagcccggccgcagccggcccgaggagaaaagcccctgattccgacaaagcccttagtgaattgaatcgttttctcctttcagccggaataagcatcgtcacatacgccatggaacacggacgaaacatcgcattggccatttgaatcaaaaacacgatacaataaatggaaaacaaagaccttacagtaaacatcagcggcagaacggcaatgaatgcagcccggatgaaatcaagcgacatcatcatattccgtttgttacacctgtcgatgatgctgcccgcccacccatttgtcatcaaaacagccgcaggcctgattaaataaaggatggaaaccgcaaaagcagaccccgtttcttttaaaacaataagattaagagacaaaaaataaatccattcaccaatatttgctatcccgattccggttaacagaagcatcgggtaccgccaagacttcaggtttttcatcttatccctcccttagaaataaaaaacgccctcaagacaataaagtcttgaggacgggaaacagcccgctatgccacctcaattcggtttggtgccggcctcttgccgggtacaaaacttactcggtaacaggagtatccgccgcatcatcctcgtttttcatgattccgatgcgaagctaagaggtttgtttcaacacatccattcatactccttcacagctcccggagctctctgtcatgaatgatatctgtctactcgtctcttcagcgcttttcgttatattcttttcacccttactttttttaacaatatacaggctcaatcagcaaaaatcaagaggctgtaagaaataaaacctgcctttgattaatttccctgtacagacacaaacagcctgactgccacatacagttacatataggcttttgcctacataactttgtggaggtgaggatggtgacaggtgtttttgcagcgctcgggtttattgtgaaagaactcgtgtttttagtatcatacgtgaaaaataatgcctttccacaaccgctctcaaatagtgaggagaaaaaatacttagaccttatggctgaaggcgatgaacatgcccgcaacatgctgatcgaacacaatctccgtttagtcgcccatattgtgaaaaaattcgaaaatacgggagaggacgcagaagatctgatctccatcggtacaatcgggctgatcaaaggaattgaaagctactcagccggaaaaggcacgaagcttgccacatatgccgcacgatgtattgaaaatgagattttaatgcatctgcgcgcattgaaaaaaacgaaaaaagacgtctcccttcatgatccgatcggccaggataaagaagggaatgaaataagcctgatcgatgtcctcaagtcggaaagcgaggatgtgatcgacaccattcagctcaacatggaacttgaaaaggtcaaaaaatatatcgatattttagacgaccgcgaaaaagaagtcatcgtcggccgcttcgggcttgatctaaaaaaagaaaaaacgcagcgcgagatcgcaaaggagctcggcatttcaaggagttacgtgtcgcggattgaaaaacgcgcattgatgaagatgtttcatgagttttaccgggcggaaaaggagaagcggaagaagaaaggaaagtgagcgaaaagccggatctgacatcccggctttttctgcattttaggacattcctcttcaagtataacttcaggatttaaaagtaaaacataacaaatgaatagaattggtacaatcgttaacctttttaatgattttgaacctcataggaacccttacatgacaggatttttgttgtttttcattgtttatcaagatctaaagcaaaagaacttgctatttctcaaatacatccaccaaattttcaatgttagtttgcttttcatacatactactaataaaagtaaaaccttattagaactttacaagacaagctgaattgactatagtctaattagactaaaatattgatgtaaagaagtgaaaaattaaatgataaagtcttttttaatgttggggcagtcgaatatggcgggccgtggatttttgaatgaagtagaccctatctataatgaaaaaataaaaatgctgcgcaatggacagtggcagatgatgacagagccgattaattacgaccgtccggtttccggcgttggcttggcggcatcttttgcagatgcttggtcgaaagctcatcccgatgaagaaattggcttgatcccttgtgcggaaggcggcagttcattgaatgactggcatccggaaggcatcctttttcagcatgctttgtccgaagcccgcttcgccctccgttccagtcaaatttgcggaatcctttggcaccaaggtgagagtgacagttatcgttcgctgcatgaaacttattacgagaaattaactcttatcattgagacgctaagaaacgagttgaaacttgatgatgtaccgttgattattggagggcttggtgactttcttgggaagaccggttttggacagcacgcgactgaatttcgacaggttaatgaacaattgctgcgttttgctaatgaacaacagaattgttattttgttactgctgcaggtttgactgcgaatcctgatggcattcatttagacgcagcttcacaacgcaaattcggttaccgctatttcgaggctttctcgaaaaagcaccatatcctgaaacccatttcgggagaggagcaatcactgaaagtgaagggtgactattctaaaacagaacagatttaccttcatagtatggatttggcttcgggtaaaatcacgtacgcggaatttgaggcgcggatggagaaggtgatgaaaccatgattcccttacttatccttggcttgctcatccaaaaccccggagctcacggctatgaacttctggccttaatggaaaaacgtcattacaaatacattgttaacttcacgaaaggttcattttattacaatctgcagcaacttgaagaaaagtgtttgattgaacagattcagcagaaaccctcaaccagcgggcgtgaaatccgtaactttaaagtcacagattcgggaagggcagaatttgaaaaattaatgatcaaatacggcaccaaatcggaatatgtgaacctgcaattttatggggcgttactctttgccgatgaattcgacaaaaataaattactggaactgatccaatcacaaatcgatcagactaaaactcgaatcgagctccttgatgaatacctgtccatcactcaagaaattcccggcacaatcaattactttcgccgtatgaatgaaaattcccgttcacatcacttggttaatttagagtggttcgaaaaattgaaagcagaaatagagtgaactattgcataataaaaaaatgcaatgtggaatatataagaatattttagctaaatataaaacctgtgtcgcagatatctagtaacatcattgatacaggttttataccccttctttaattaaaccagctaatagggttgtcaacacttgccccaaacaagagcaagtgagtctgctgcgtgttcttctttttcaatccgtatgaataaccactttttacacctattcagtattcaagtaagtcaactgatttttctccttcttccgctaaactgctgctttagtcgaataaaaaaagtgatctcccttaaggaagaatcacttcctctaattgaacaagcagtgaagatgaacatcgttctcgacatcaactaaaattttttaactgcctccgcgtatgcagctttcaattgattgatagtaaacccctcccgcaagaaaactccgtctttttctattttcttttcaatataaaacaatgataactttctttcatcttatgaaacccaagcagttattaggtgttttctttatctgtacaaatacaggtgagtaacttaatttattacatataagttatcctgcaaaactgtgcacgaaatgtcgggcagatacatttcgctcctgttattcttttgttaaaggaggtcaaataaatggattcgcttaaaaggatgaacagcgcattaacgtatattgaagaaaacctcacgaacgctattgatttcaaagaagcagcaaggcttgctttctgctctgaatatcattttaaaaggatgttttccttccttacaggtatttcattatcggaatatattcgccgcagacgtcttactcttgcagcttttgaacttaaagacagccgcgtaaaggtgattgatcttgcaataaaatacggttatcactcaccagattcttttgcacgagcatttcaaaatctgcatggcataaacccatcagaagttaaacataatggccattcacttaaagcttatccgcgaatgaccttccagttatcaatcaaaggaggaaatgaaatgaactatcgcattgaagaaaaagaggcatttcgcatcgtcggcattaaaaaaagagtccctattttgttcaaaggcgtgaatcctgacattgcatcgatgtgggaaagtttagatgaagcagcaatcaaacaactaaaagagctttctaatacagcgcctgcaggactcatcagtgcatccacgaacttttctgaaggcaggacagaggaaaacggagagcttgatcactatattggcgcagccacaacgaaacattgcccaaatcacctatcacagcttgaagtccctgcctcaacatgggctgtattcgaagcagccggatcatttccggatgcactgcaggaagtatgggggcggatttattccgaatggtttccatcgtcacattatgaacaaattgaaggcccagaaatcctgtggaacgagcataaggatgtaacatcgccatcttttaaaagtgaaatttggatacccatttcaaaaaaggaatatatctgacaatgaaattagaggaattaaaggttttaaggaaggggtcttatcccttcctctttatgtcactaaccccatctgcggcaatattgatgccgctaatcttcgaattgagttttttaatgagcagagccgatcttactgaaaatataaattgaggtgtattgcgttttgatgatctgcttctcacttcttattttccgccttaacatccgatcatttctgcaattcttctgcaaagtctgacgttgatgattgaccgccaagtctcccgttttgattcctgccttcacggtttcccgaagtgagttctctattaattccgctgcttctttccgagaataaatcacttcacaacagacaaactgaaggcggtataaaaaacagctccgttaaaatggccggaactgtctttgacttttggattttgcagttatctccatccgttagtttaattagaattcagataatccaagacacgatcaactctttcattgactgagtaatctccttcaatttttaacaatggacaagataaatccgacatccaatgttcgtgtaaagctttgcttctaacttccattccggaatgatcatataaagaagcccactctaaaaatgtttttgattgttcatatttactgccgccggctaacacttcgtttccataacgctgaaattccctatgccttaatctctcaagccgtatatcctgcggaatccataagaagatgacaaggtcaaaataactttttagatcatcgccccagcggcacactgcgccagaaagaatccatttctcatttattgtcaagtcttttttaagtaactttcttctttcagcgatttctctttttttagtgaatttatctgtccaatagtaatcatcagtatcaagatgcgtatgcggcaaatgctttgataatgcaacacccaatgttgacgttccgacaccagaggctcccaatatgtgaatcttatttttcatacttccccctccttatgaagcaaccaaactccctgttgcataaggtacttactattattttgacataaatccctaaagacctttactttgccaggggaatccagatgcggttaaaaccataccgcttacgaacttcatagtcattttcaaacagtgattaactttctctccggcctattttaatatcctcatacactttttcaaaagtctcgattggcagtgaaaacttggttgttttctcgttacggtaattgattacgattatttttttgttcagactcaataagtgcattctcccatttatctctgattgaaatgatacaattttccatttttcttttcctttttcttataaatgtaattcactttaacgcccctttcattgatcggcaaaaggttccgtaataaggaagctccttaaaaaaaggatcaaaacttttatcaagtttgatccttttccctttttagtcatttcttcgcgaacgtttatagacattcatggttaccagccagctcataacaacgattcctgtaaaaagaatgagcatattactgtacaaataagcggaatgatcatcgttaacaggcagcagcctttgattcagcaagctgatcgataataaaccgcctgcaatcgaaatacccgttccctctgataaaaagctcgtaaaattaagcagactcattccggcgccggcttccttttgtttcaaactgccagacacaattgtagatataaccgtttttgtgaaggagagccccccaaacacaaaaacgattatgacggtcataagccaaggtgccgcatctatgaaaaaggcagcgattaaaaagctggaagacatcaatacaatcccaatggtcagcacacacaaagaacctttccgatcaacaagcaatcctccaatgtaaccgaagatgatgacgctcatcgtcccggggaacataatcccgcttccaattgccgcagtacttaaatggtgaacatctttcatcatataaggaaccatagacacaaatcctgcagcagtgccgaatatcaggcctccgctaaggacgcccgtcataaacaaaacatttttccccagtgcagggtcaacaaagggatcttgagttttcctaatatgtttcacaaatatcaggaaagccagaatactgatgatcagaaaagacattctatatgacgttgtaaacagcagaaaaaatacggtgcctgcagacattaatataatccccgtcatatcaaagcgcccgctgattctttcttccttttccagcagtttcatcaggaatggaacggtgataactgttgctgtcggaataagcagcaaatatgaccagtgaatataatgagcgatcattccgccgatagctggtccgacaccttcccccattgccaccagcgacccgatcagaccaaatgctttacccctgttttctttcggaatatagcgtactactgcaaccatcacaagagccgggaatgcggctgcaccagccccttgaataaatcgggccagaatgagtacaggaaagaaagagtgtccgacaaatccaatgatcgatccgaagccatttaccataattccaaataggagcagttttttgatgcccagctgatctgataacttcccatacagagcagttccgatggaaaatgttaacataaaagccgtgttcacccagtttgcactcgctggcagtttatgaaaatcgttggcgatatcaggtaacgagacgttcaaaaccatttcatttaatacgctgaaaaatgacaaaacacaaagccaaatgaacacttggttgtgccgtaaagctgactgtgaataaggcgtattcacaaatttccctccattaatgagggcagacgcagtttatagggccattgatacgcttccctcttttaattgtaccctgttcatttttttgcacttcatacataactccccctgcattgattgatataccttattataaatcctcaagccgatgttttgaatactttgcggcacacacccgctaaatgacgaaacatcaaatactgttatatttaaaatttacagtaccaaaaaaccgcaatttcatttgctgttgaaaaattggaataaagcattgtatcgaccgctcctatgacaaagttatttttggcataaaaatgacaagctgaaacattaatatcttgtgtttcaagcataagaccgcataaatgattctcctttgcccactcaatcgctttatgtaataaagccgtcccgacaccattttttctataatcttttgcaacggcaatgtcttcaatcagtgcgtatccattccaattagaacgaagcttactccggccgacacagtcgttctctgcgtaataaaaaaagacaactttatcctcttcttcagcataactgacatcaatgtcttcatcgtcatattttttgacataaggttcagcaaatttctcctctgtatatgtccaaacattgttttcaaatgaagggatgattctccctgaaacaacgaaaggttcgtttggtttattgaagtctttcatattgaattgagtcattttagttatcatcataatcgcctttctgcagttattgaactcactttacaccttttgaactgttgattcgtctgcatgtcacgaagactaatacaaaaaagataccaacattgattggtatcatctattcgttcgagcccttacaacaacatcctatttcggagcttccaaaccaaatgttgtccattcctcttttgccggaccataaatacccggaacaggtaaacctgcttgtctcataaggacagtcatttgtcctcgatgatggttttgatgttgaattaaaaacatcaaaagtgaaccattcggcaattgctgaccaataaagttgacacattcttgaagtgtatcgtcagtccattgcgtttttaacgcctgcacaaatgcattactggcttgatgataactctcagcaataaaccgcgccgatgcaggaacaggataatcttcagccggagcgtggaacgttaaatctgtgttcgaggtaatgatatgaatggccgcgacagtatgccatgcaatacggcctaaagtccaatgttgtgaagtgatttcttgtttaagtgattcatcagtcagatgattcagcagtttttgtgtcgcatcggcttcgaattcccaagatttcaaaaaatggtctaaggtttgaaacataaaaatcctccttatccttttttgtgtttctatatatctgcagttcaattatagcgctccgtttagttaaaaaagaacaaaacgatacacagacaatacaataacagacaaaatataagaacataacagatcactctatacttccttttcttcaatcggcaaaaaaggatagctgttcaaacaggattcttctgtgtctaatattttcgctttacaaaagtccataccgtcttagtgattgaaccggagataaaacagctccccgtcatcatagccacccaaatgaaaaatgtcggttcggcacctattacaataaacataaatatcaaggacaaaatgaatacaataacaaccatcatccatacttttttgaagatgaaatatcctaaaatccctaacagaaaagaagctgctggaagaaaaatgagaatgatatacgcgggactcaacagcgggctaatacaaacacctcccaatttcaaaacgaggaagttcctactttttgtctgatatcaaatgatatgaagtgatttatttcatcttgatattacgccgtttcattcattttatacatattataccaatacaattgggtcaaatatagatatttattcatttttaacatattttcggaaaatcaggagtgatttaaagtcggaggatagcccgctttttcttttcctagtaagtcctgccgcattggctttagcccatctgctttctcattgtttttgcagcgctaatattctcataatcgtgtgcatgacgctgctttcgtcatttgatttgatgacaaagtgcgccgcatcttttatttcgtcaatggcgttcttaaccgcaaagctgtaggaagccgcttccatcaattctttgtcattgcggccgtctccgaatgccattgtttcatcagccgaaacccctaataatcgctgcagttcttgtactgttgatcctttatgtattccgatatttgatatgtccatccaggtatcttctgatgctacgatatataattggtgaaaaaattcatgcagcttttctctcgtttccggacagttggcgtcggggtcatgaaccgtaatcttgataaaatcgtcttttatctcagtaaaatcagttattttcgttacatgtgcataagaggcatttacatatttcatttcactttcagacagattttcttttacgatcgcgcctttttttgtgcacgcgataatggtgtgcccgcagctgattttttctaaagcgcctataattgacagtccggctttattgctgatcaaagattcatatacgaatttgccgttctttttcatacgtgcggcactgtctcctaaaatccaaaaatctttcgcgtcttctccgaataaggcttccaccctttcacactgtttcccggtgcagatggcgaaagcgacatgctgttcttccattactcgttttgtcttttcaaataacgttctgtcaaaatcgccttgattatttaaaaatgtgccgtctaaatccgtaatcactaatttaatcatcgttcagcacctccgcagttaaaatgtctttttcagacaaagggtttttcacatttgagaatggaatcaatcgcgtttaagaccccttcctcattgtttgattgcgcgatatgcgccgcggcctgtttaatgctttcctgcgcattatccatagcgactccgtatttcacggcagacaccatctccaaatcattgccgctgtctccgaaggccgcacattcttcatcatttatcccccattgtttctggagaagcctaatcccgcttgctttatgaagccccggtatgatcagatctatgtcaccgtgcccgcttgatacaggcgtgacgaaagacccgatggcgtcttttaaatgcctcagaagtgcggaacaatgttcggcgggaaaactgatggaaaattttaaaatgtcatcatcgatgttttcaaaatgcggcaccctttttaacacataataatacttactggcatgcagatattcatcctcactggcattttcatgaatatacgcgcttttttttccgcagacaatgacgtttttcacctcatactgctctaaagcacggatcacctcttttatagtgtcttcagacatgttacccgcgaataattcttctccggcattcacgacgaaagcgccattctcggcaacgaaagcgatttcacttttgatttccggaaagaaggatgtaagctgcgcatattggtttccgcttgctacggcaaatttaattccccgcgcttttaattcacgatactgattcataaaacgctctttgttatatgccatttcatcattcaaaaacgttccgtccatatcaaccgctatcagtttgatactcatattgtcctccttttttcgaccgcttttgtcagagacccttgaagagatcatgcataagcgtatgaacgaattatatccgcagttgttttgcaccgtaaatcattggctgacgtcttgttttgaatgacacaaaaagtgatttgtcacataaatataacactatgtttcttttaaaaatgatatgttacgatgagatgtacattcaccattctcataaaaaggagaatccccctgcatgttcacacacgaaatgattgcttcatttaacgagcttgaaacttctttatacaactacatctcccaaaacagcgagaaagtcgtctatatgcgaatccgtgaattggcaaatgaaacccatgtatcgacggcttctattttacgtttctgcaaaaaaataaactgtgaagggttttcggagtttaaggtgaagctgaaaatgtatgcggaggcaaataaaaaaacgattttaaagagtccccatcattccgttgccgagttttttgaaagaacagtaagcggagggatggaagaaaagctgaaggaagcagcagcccttgcagccgatgcagaaagcgtcatttttatcggagtgggtagttcaggaattctcgccgaatacggagccagatatttttcgtgcttagggaaactttcaatgtatattaaagatccttactttccggcccattcccatttccgccataacagcatcacgatcgcattatcggtttcaggtgaaggagattctacggtgactcatctgaatcagctgaaacaagaaggaagccgggtcatcagtattacaaatcataaacattcaaccattgccaaaatgtctgatgtgaatatttcatattacgtgacggaagaatgggttgaaaatgcgaatatcaccacccaaatccccgctatgtacatacttgaatcaatggctcgggagatatacaaattgagagattaaattcaggaacggaccacggaaatttcggcctttttgtaaaagtgatgaaaaacccttctctgctgccagagaagggttttgaagattacagatgagacacaatacactttgcatggcccgccagtttatattctcccaaaccggaaggcaggagaatgtgatctccttttctaaagggatgttcatgcccgcctgcaattattattccgtctccttcgatcacgctgacaagaaggaagggatgattctggaataaattcgcttcaccttttacatcccacttttcgactgaaaaataaggacattctattaaaacagctgccagcagatcatctgtttgtttatattgaacggtcggccgttcacggacagatggaacgtctgtcacttctatacttttttccaaatggagctcgcgcagcctgccgtccgcatcttttcttccgtaatcatacaatctgtaagtcgtatctgaattttgctgcgtctctaaaataagtgtgccctttccaatcgcgtgaacggtgccgcttgggacaaagaagaaatctcccggctttaccttaactctgttcagaagtccgtcccattctccgcgctcaatcatggatatcagttcttcttttgttgttgcgctgtggccgaaaatgatctccgcatctttttcacaatcaatgatataccagcattcggtttttccaagttccccgttttcatgcattttggcaaagtcatcatccggatgcacctgaacggacagatcttggtccgcatccaaaatttttgtaagaagaggaaaacggtctccttcaaggtttccgaataaatctctgtgatgctcccacaattcaccgagcgtacatcctttatacatgccgtttcgaactgtgctctgtccattttgatgagcggcaaaggcccagcactcccctgtccgctcggacggaatattatagtggaaatcacgcagggcggcgcctccccaaattctttctttgaaaaccggattgaaaaatatcggttcagtagacatgatcatcccccgctttattcgatttcttccagaagcccatacgcctcttcttttgtctgaacggagagcagcctttcccgatagctgtcatccatcagttttcgggataacatctgcaatattttcagatgctgatttccgccgctttccttcggtacggcaatcataaaaatcagttttgcatcagaaccatcaaggctgttccagtcaacacccgaacgtcttattccgaatgcgacacccggcgttctgacggcatcagactttccgtgcggaatggcgatattcatacctatcgccgtggttccctgctgttcacggctcaaaatggcctgtttaaatccgctgtcagacagaagcatacctttacgggacaatttctcgatcatttcatcgataatgtcatccctcgtttcgccggataaatgcggttcaatcaagtccgtgctgataatgtcagtcagttttttgatttcggtcatcccggcttttcggctgtcagcctgagatggttcctttgtttcttttgccgctgcagcttcatttggtgcggcagacggcagcacctcaccgggcgcgggggatttcgccatatctttcttcagtacattaaccaacagagcggtgacaagagagcctgctgttacagcgataaaaaacatcaatacatgatctactgctccaagtacagcaacgatggggccgccgtgtgccactctgtcccccacatggccgatcatcgctatcaccgagccggtcatagaacccgccataatactcgggatcacacgaaggggatcttgggccgcaaatggaatggctccttccgtgataccgaaaaggcccatcgtaaatgacgcttttcccatttctttttctgcggcggcgaattttctttttcctaaaaacgtcgcaatcccaagccctatcggcggtatacaaatggaaacggcaatcgggcccataatttcataatttccttctccgatcattgccgatccgaatagaaaggccaccttgtttacgggtcctcccatatcaaaggagatcatcgctcctaaaatcaatgccaggagaattgagctcgagcctttcattcccgcaagccaaaccgttaatgatgcgaaaatatgagcgacgggggcgccgatcagaaatacaaacgccaaaccgacgatcagtgaggcaaacaccggaataataatgatcggcataatcggctgtattgctttaggaactttacattttttgattccaagcgccgcatatcccgccaaaaatcccgcaatgattcctccaagaaatcctgcgccgctcgcactgtcgtaaaagctgccggatgccgcaatatatccgccgatcattccggggacaagacccggcttatcggcgatgctgaacgcgatgtacccggctaaaatcgggatcatgaatgaaaaagaagcgctgccgatctgttcaatcgttttccaaaaagacgcatccggaatgactaagccctttggtgttttttctcctccaagcgtcaatgcaaccgctatcaataatccgccgacgacaatgaaaggaaccataaaagaaacgccgttcattaaatgacggtaaatcgggttttgttttttgccctgctgacttgcggattcagtttttgaagcagattgatagaccggcacttcaccgctaagcgctctttgaattaattcttccggtttgcggatgccttcctgaaccccgacggccagcagcttttttcccgcgaatcggtctttgttcaccgaacggtccgccgcgataatgattgcgtctgcttcccggatttcctcttcggtcagcctattttccaccccgattccgccctgggtttccactttgatctcaacgcctaatctgccggctgctttttgtaaattttcagcagccatatacgtatgggcaatgccgttcggacatgatgtaatcgctaacagtttcatataaatcctcctttgcagtctgaatttcaagatcttgtctcaactttatactgaaatcagcctgtgataagcgcgtttttttaccataagttccggaaataacggcatttttccctataaacagaaaaaaagcagggagccatcccctgcttttaatagtttaaatacgataaaaacgtcatcacatttttttcttccgtcagtttttgaataaatgccggctgctcgctaagataggaaagctcactgaataattgctttaccttgttttgatcttcgtgtttgacggcaagcataaatacaagcgacaccttttccgtcccccactcaatgggctcttttaaggtggcgattgcaatggctgattgtttgatatatttagagttcgcgtgagggatggcaatacccgccccgatatttgtcgccgacattttttctctcattactgcatgaatgccatactctttttctacatagcctttttcatacaaagcctgcgccagcttttcaatgacctgataacggtgctctgtctcttgctgtaaaaaaacgagaaacggagtcgtatcattcagcattttaaacgttttttgctcccggcggtgtgatgtatcaagctgttgcataaatgcgctgagcttcttttcatcagcaggctccaaaagcggtgatacgacgatatgagggatcgttacatttccaagccctatcgtagaaatgacgaaatctatatctttatgctttttgatatactctgtcagttccgcttttgcgatacagtcttttatcgtaatgtgatgaaatttgcgttcaattttagtccgcagcaattgcgacatgccaatgcccatatggcagacgatgatcgtccttttagggttatgactgcttcggcgcagccgttcgatcgctgcctgaaaatgcagggtcaaataggccgcctcttcttcaggaatataaagatcaaatgtttgattgatgtcttctaaaacgtcaatgataagatgaaacaaataaggatacatttttttgatgtcgtggagcatggggtttgaaacagagagatcatagctcagccgcttcaacaccggatcgagatgaatgttcaatccattgatcaattcctggtctttatggaaatccagcattttcagttctgaaacgcgattgatcaaatgcctgacgactttggaaagctcagaatcttcaagatcaagcttcttttcttgctgcaatggatagcgcactttcccgcctattatatgtaaagttaaatagacggcttcttcctcgggaaaccggatggcaaataccggctcaagccgttttaaacaagccagtgtccattcatattctttcttcttttttaccgcctccagctgccttgcagagatggcgaccggctgtttcattttgatacggcggatggtcagcaatgtatgcagcagcaaactttcaaatgtttcatccgtaaaatagatagaatggtttttttgtaataacttgatttcttttctcacaaagtccgcttcatgacttaaaaacttactttttataaattggcttgtaaactccgcattatcaatcaaatctgaaattcgcgccaatgcttttcttttgtttttttcgtccccttcaatctttaagccgagccgctgtttagaaaccagtgtgagatcaaatcgcttcagccactcttcaaccgcactgatatcctttttaatggaagctctgtttacaaaatgctgtgcggcaatttcttttgcggaaacgggctttgaattcattaataaatcataagcgatgtgaagtattctttcttcatcggtcttgtgcctgcatgtaaagtgctcattataaatgtgccggcttaaccgtgatctttcctgttcagatatatgtaaatagacgcctaatcccggtttacggatcagctgagcttgagcatgttcattcaggaaatcttcaatcgttttcaaatcattcctgatcgttttttcagaacagcggaccctgtctgcgaaatcttgcacaactaagtagtcatcaggttcagataacaacagatacaaaatctttttctgtcttgaattcatgtatttcatctgtttttctatccttcctgtccgtttctgctggagcaattgtgataggttaaatataccgcgcatacgaaaccgttttcattgtatagtgaaacaaaagagtaaaaagttttgttttttaccgcagattccggaaaaatcatgttttatactgaggctgttcacctttggttgacaacaaaacaccaaccgtttttaaacgattggtgtcggcagcgaaaacctgctgttacagccaaaatgtttcgccaagcgctaatgctctcaggttttcaggaggtaatgcaagccggtcccactcaccgtgcagtctgcttaatgcttccgggcctgtatcatcagcaagccggaatgccccgtaatgcatgggaatgaagctgtcagccttcagctctaaaaaagctttcacggcgtcttccggattgatatgtgacactttcataaaccattcgggttcgtatgctccgatcggcatcagggccgccttaatacgaaacctctctccgatttctttaaagccttcaaaatagcctgtatctcctgcaaaatagatggactcgccgttttcgctttctatgacccagcctccccaatgagaagtatcggtatcccaaagcgttctccgggtccagtgctgggccggaacaaatgatatattcaccccccgcatctcaaaacgaccccaccaattcatttcatgaacctttttgcggcctttttgatgaacagctttttcaatcccgcaggcacgtaaaaatccgggtttcctctcagtttttttatactcggaaaatcaagatggtcataatgcccatgtgagatgagcacggcatcaatgtcaggcagttcgctcaattcatatcccggctctgtcagccgtttttgaaaacccatcctccgcgcccatacagggtcggtcattatgttaagcccctgtatttggatcagaaatgaagaatggccgatccatgttatggcggtttccgtccgattgacggcaacatcacggacatcccttgtgaccgctttcggaatattctcgcttaaatctttacttttttctcttcgttctttcatccatttccacatgtccatgaatccatgttcattcttcacgccattcaagttttcatatctttttttcattatcattctcccttgaaacgtgtattccattagatccaccggacatttatacaatgtctgtaaataccgccccgcttgcttcggctaaatcatgaggcgctacttttagctgcattccgattttccccgcactgacaatcataaacgccagtgtttcagcggatctatcaataaaagtaggaaacctttttttcattccgatcggagagcagccgccgcgtatatagccggtcactcccaaaaggtccttcatggcaatcatttctattttcttctcacctgccgccttcgcagcctttttcagattcagttcttttgcaacgggaacgacaaagacgtaataacgatcagttcctgcagatgccactaaggttttataaacatattcggcagagtatccgattttttgtgaaacggaaagaccgtctgcgggctgtcccccttctgttttgtaacctaatagctcatagggaatgttttgctgctcaatgatacggacagcatttgttttcactgtttttttcgccatggttatcctccgttttctgtatttctttctgctttattttcaacttcgattttaataaaatgaccgctcagttgcgtgctttgtaataatcaagtgcaaactgtttaaaacgctcagcagcgggagagagagcatggttttttaactgggctaacgctatggtgcgttcgcattggtaatctgcaaccgggagaaaaacgaccggaaagtatgaatgctccgcggttttcggcagcactgcagccccaagacccgcggcggtcagccctaatatggttgacacttcctctccttcaaatgcgagatgcgggtgtatattcaaatcccggcacatcagatcaaacatatatctcagcccgtatcccggtttaaatccgacaaaatcctcgtcctgcatctctttcatttgaatgcttttattttctgcaagcgggtggttctcaggaagcaccgcataaagaggctctttctccagcactgtccattgtaaaagctcgctgggaagcggcggggagctgagacagatatccgcatctcccgtttccaccattttgcgaagcgtttcatttgcgccttgatacagccggaaggtcacgtttgggtatagctttttaaattcggcaatcagctgaggcatcaagcgcaacccgagcgtatgaagaaaagatacagatatttcgccgtgctccaggctcatattttttttcacttgttcaacgccttcatttaaagctcgtctcgcttgttttgcttttattaagaactgctctccgtgccttgtcagccggacggcttttgtctctctgtaaaataacggcgcgcctaattcttcttcgagcctgataatcgatcggcttaatgccggctgagaaatcattctttcttttgccgcatttgtgaaatgctgatgagttgccgccgcaatgaagttgtcaatttgatgaagctccattttctccttctcccctttcttcataacctacacgcattaattctatagttattataaattagacacattgaaatgaaaagcgtacgatacatatataaccaacagtgagaaaagagggacattcatgacgtttattcagcctcatacaaaggcttacagaaaggccagcttggcactgtttatcagcggctttgtgacatttgccacgctttacacgacacagccgcttatgcctttgttttcggaagagtttcatatttccgctgcggctgccagcttaactttatccatctcaacagccgttttggcattttcattattggccgctgcttcgttgtctgacggattcggcagaaaaaaattaatggtgctgtcgttaacagccacttctgttttaggtctattaacagcgttcagtccggcttttccggcgcttttggcgatgagggggctgctcggtatttttctggcaggcgttcctgctgtcgctatgacatatgtaggcgaggagtttgatccgaagggcctcgggaaaatgatgggcctgtatatcagcggcacaagcatcgggggaatgagcggcaggctgttaacggggcttctgactgatgtattcggctggcggccggcgcttgccattatcggcattctttctattatattaagctatttgttttggcgttttcttccggctccgcgccattcatctcagcggcatgcgggcgtaaaagcggcatgtaaggaatacggagcggttctacaccgcaaacggctgcttttgttaatatctctgggatttatattaatggggagttttgtgacattatataattatatcggctttcatttaatggcggctccttatcatttgtcacagactgtaatcggttttatttttattgtctatctcgcgggaacgttcagctctgtctatatggggaaaaaagcagatcttttcggaagtgcaaaaatgattaagattgcgatttttgttatgcttgccggcgcagcggtgacacttttgccccagcttgcccttaaaattgcgggcattgccgtgtttaccttcggctttttcggcgcacattcaattgcaagcgcctgggtcggccgagcagccggtgatcagcgcgcgcaagcttcttcattatatctgcttgcatactatatcgggtcaagcgcggccgggtcttgcggcggtttcttttggacgcattttcattggatcggtatcatttcatttatttcggttttgctattgctgtcttatccggttttatttctggcggaattcagaaaaaagggacatagccgcctgcatgtaaatcaataaaaacattaaagatttgtgtcttttgtccgatactaaagataaggccggcacgatactccctataactattccttttgattcagtagatttcaaatatcgtgccggctttcttcaattaaaacacaatcttcaattgccttacgcttctgttacacacctgcccaaacatctttcgcatatcttccttccgcctgcagctgttcaagccaattcgaggaaacttttgaatcagtgttatgcaccttttcatacgcctgaagcagtacattttcgacagccggagccattttgcttccgtctccgcatatatagagatggccgccttggtcaagaagcgcaataatctgtgcagcctcgcgaagcaggacatcctgtacgtaaactttacagtcctgatctaatctggaatacgcccgatgcacggtgacaaggccgtttttctccgcatggtcgaattcatctttgtacagatcgtcttcttcagggtgtctgcagccgaagtataaatgagcttcgcccaggctgttaccggacattttttctgcagcccgcgcctggataaatcccctgaacggtgcaattccggtgcctgctccgatcataatgagaggcgttttcgtaatttcgggcaatgcgaaacccgactgcggcgagcggatgaaacagacggcagaatcgccattttgtaatccggctaaatagttcgaagccacgcccttgtattctccccggccgctccacgccggagccgtcacaacgccgaccgtgatactgagctcccttttgtttgccttcggtgagcttgagattgaataatagcgcgcctttaaggacggcagaagttctaaaaagcgctcaaacggcagttcacacgccggataatcttccagcaggtccagcatggtcattcgttttttcagcacgttttctttatatgccgcatcgtcagaataaagatgctccaattctttttggtgcggcgggcacacggtatgggcggcaagttcgcgaagctgggctctcgttgccggttcctgcagctctacatatgacgccaaaagctccggcgcattaaccggccggtccatcggcagatgaggcagctgccggcccttgatcttaaagtgctgatttgggtcgagaccgaatcggcgaatgacacggctgatcagttccccgctgttttgcggaagcaccccgagatggtctccttcccgatacgtttcggtcttcgggagacgcagctcaatatgccggactgaacgcttgctgctttcggtatgaagctctttgtttgtgatgacttccgcctcaaatgctttgtacgttttggcaatcggcgtctcggctgcttcacttacgtattcgattgataactgtgatttgtttgcctgttttggagcggcctctatatgaaaagccttcatgatgtccttccagaatgagtcttcccaggcttcctgactgtactcaaaatcatcggcattgtcgccctccccgatagaagtcagccgttttgcccctttttcttcaagcactttgtctatcaggcggggtaccctctggtaagtggcggcccagttacggtctccgcagccgaagacggcgtaagaaacaccctttaattcctgatcttcaagggtttccatccatttcacaaaacccgccgcattatcaggcggcgccccgttataagaagccgtcacaataacgactgcgccttttacaggcagtttcccggcataatcatcgagcgggccggtttcagttgaaaatcctttgcttctgccgatgtcagccagctcttccgcgattccttccgcagttcctaaatttgatccgtaaagaatgagaagcggcgttccgtgggacgggatttctttcgtttcttctttgtgaccgccgccttcagctttatggttttgtacgggctgatgattggacacgtccttgttttttacacggattttaaaatcaccgggcttaatggttaaagcttctttaatcgtaagctcataatcagtatgatcaatcagttcaaagtgtttaaggacaaggccgagcaccattgtcgcttcctgcagggcaaactgcatcccgatgcatgcgcgctgtccgtttccgaacggcttatacgcatcagccggaattgccgcgggatcgctgaacctttccggacggaatagctcggcatcttctccccacgcgcttttatcccggtgaagctgcggagtcagaatcgtcaccggctgtcctttcgcaatcggatatttcccgccgagaaccgtatcttctttcgcgtacagggaaaatgccggggcagtcggatacagccgtaaagtctcgttcaacaccatgcgggtatatgtcagctgctgaatctgcttatattcaggtgtctctcccgtcagcacccgctcggcttcctgaacggcttttttcaatttatctttatttttcagcaggcagtaaatcgcgaatgaaagcagtccgcttgtggtttcatgccccgcgatcaaaaaggtaatgatttgatagcggatattttcatcatccagcctttcacccgttacaggatctttcgcttcaagcatcaatgctaaaagatcagacagattctcatccggattttccctccgctcagcgatgatccggtctacgagttcattcatcacttcaatatcctgctggaactgatgtctcgttttgatcatcagcttgtcctgcaggctgtgtctctgtgattggcgcattgcctcctgcagcgcgcgaagcatacttgtgataaaaggatgctgtgtgtcgcggtaaaagctgttaaagcggtaatgaaatccgcacaggccgattgtatccagcgtcaggcgcgtcatatcttcggcaacgtcaatttcttcattcggatttaatctgctccacttctgcacaagctgcatggcaatatcaagcatcattgaatgatagcctttcatcgccttctggctgaagctcggcaataaaatccgatgcgctttctgccaattcttttcgtgagtccagctcgtaaatagtccgtcaccgccaaactcacggactttcagcaaggctttgctgaggtttttatcaaatcgcttttcatcacagacttctgccgcgagctcgcggcctgagacgaagaccccgacagagctcggaaattcgaaacgaaagatcgggccgtattcttcggcaattttccagagcgattgtgacagtttttctttttccaagtgagggagatttttcagaggtccgtatgttttcggctgcggtatagcgcttagctgtttcatatcgatcttccttccttcggcgaatagttaatgagttctgatggcatcccaagaacattgttccaattctttcagaaacggttttgttatttcgacgcttcccgtccggataagctgatagagtttgagatatgccccgagcagcagcgccatcagcacattggacggcagattgcggagcacaccttcagacttgccgcgctgaaaaaagacgtcaagcatctgtgttatttcatcaagaagcttacggctcgtttcattcagaaagtaggcgtccttattcgtttcaagaaaaaacaatgcatactcactttccttcgtaaaatcaatcagacaataaaacaggtgatgaaacccttctcttacagagataccctgaaagtccgttttgacttttttcataaaacgctgcgcactttcctgatacagtacgttcacaagtgtctctttactgtcaaagtaacggtagattgtgccggttccgacatcggcctgagcggcaatcatcggaatcgtcgttgcgtcaaatcctctatctgtaaacaaagtaagcgacgctttcataatgagttcaaccttgtttgaagctgtcatttcatccccctttccagatgcggaatgaatattcattccgtttgttcaaaacatttaaaatgtacggtcatctgattaccattgtataagaaaaaaactttttttaatataaaatagatgtgaaataaccaaaaataaggaaatatgcccaatttcacaaaaagagctgcagtgacttaagcagctctttttatttcccaagaaatattctatttaatggcagtaataaaatggaatgaatctctgctgacaactgaaatgtctctgaaatgctgatcatagagcacctcaatcacatccttctcactcatccgcgaaggtttcaaaaccatatagaaacacccgtcaatttgaagaacgcggtacacttctttacatgctgtcctgtaatcgctgactgtttcagcagtatgtaatgagaaaactttatgaaagctgcgatcgcggaacggtaagctttcaggcctcccctgctgaatgtttccgcgcccggcttttataaccgaacggtttgcgcgctgtgttttccgtattttacgtttcgatgtttctatgcttttaagactgcccttttcaagctgtccgatgatttgtttaaacattgagccgtttccggtcccgatttccaaaatgcggtcgtattcctgtatgtccatcaagatttgctgaatgactgactctgccagttctgatgcagcaaagtatttcgcgcgcattcgttttaatgctgaagatgtatgttgcaacattgtataacacccgcttttccattcctgtgatttattattcagaaataatattacctcgtattagtatgaggtactaactagacgcacttctcttcatgaacgtttcgatttatttgaaatttatatttgttttcataaaaaaaagacggaaaacgtaggttttccgcctgctctagtaccaataatacggtgctatatatcttgtctgccgggaaagcgccgccattctctgccggcgatacgggttgccgtagccgtgtttaaatgaatggggcattgacgcatacccgtgcccgatggatggaattctgttctgaccgccttgcatgctatcacccgcttaccaatttttctttctttaccatggtatgcaggccgtctgcgacgtgacagcaacatcctcgctaaacctggtccttctccattgtgtaatgattcagcagttcaattctgaacatgatgatctcctccttctcctccgttttggcccttcgtgtccgttcagttcatataaaagtgtttcagctggcgttctttcgcttcattataaaactcttcgacctgctgttctcgttcatactcttccgcacttttaaaacgctttgaaatggtcagtgttaaaaagaaaagattaatggtcattatcgctcaccccctttcaatatccgcacaagcgaaaataacccgcagcaaacttcatatgcgctgcgggcagactaaatccgcagacaaaagaagacgtgcttctttccctgcggggagctgcgaatgtcctgatactccgaaattaacgtgcttgacgggcagaggttaaggaaggacacgaactcttccacaggctgaatcggttcaattgtaaattttgattgccgtttaaagtcgtcatgtgattcaacctccctttgcttttttcttactttgtaagtatatccatcagcttccattttgtaaacatttttttcaagatttggacggaaaatgtgctggcattccgcttcaattgtccttgttttccggcatctttcttacctcaggaaactcttttcatcccttgctttttctgatctttttttgaatatgcaataaaataaataaggccgacaaacactgccccgccgattacattcccgataaaggccggaatgagattgccaatcagatcaccccacgaaaaagaacctgcaaaaatcgcagccgggatgataaacatattggctacaacgtgctgaaaaccaatcgcgacaaacgccataatcggaaaccatatacccgcgatttttccggctccgtcttctgcgccgaaagaaagccagacggccaaacagacaagccagttacagccgatcgccgaaacaataacttttccaaacggcatatccaatttgccttgtgcgaccgcaatcgttttttccaagtaaggtcctgtttcggttaatccgacaacatgtccgaaaaagtaagcgacaaacagtgcgccgacaagattcatcaacgtcacgatcacccaatttttcactaatgcaccggcggatattcttctggaaaaaagcgccatagataccgacatcatattacccgtaatcagctccgcgccggcaagaacgacgagcaccaatccgatgggaaacacggacgccccgattaaactcgacaagcttccccattctttcggaaggtcgccgatgacacggatatcaagcaaataaccgagtgcgataaacgctcctcccaaaaatcctaatacaatcagtgctgaaagcggtgaatgcaccttttttacccctgattcgaccgcaagctccgctatttcgtccggtttacgaaaagccataataacccctccatttatcatttcagccccgcagtttccaaagacgcctaacaaaaaaggcagcattcaaacagcccgtctaaaacgggtttgaatgctgcctaacttgtatgcatacccatacaacaatatcaagcagaatgaaaatatcagctatagaaaatgtacagatcatgcacacattccataaaattcgtccttaagccactgcaggcagttcatatcatatcaaatgtgacaatttcgtgtcaattgaatttttttcagcttttgatttcttcacggcgctcttcaattgttcggtcaaagacaaatacagacaccgcaatattctcttcgatcttgatgtctgaaaacagatgcacgagctttgctccgatgagctcttccattccgtcaggcgtttgttttgaatacagttcctgaattaagctggtccgcgccgcatgaaccatttctcttccttcaggcgtgcgtgcgataaactgctcacttgcgcttagattgccgtaaagcgttgataccgccatgttatccacaaaaacggtgtgaattcgttccggcccctttccaaataattctttgcgcaatttccggataatatcgttaaattcatgaatttttttagacatattgtcccctccgattttagcctatgaaagacattcccggttcccctttgtgacatttcacctggttaaagttttcctttcgtattgtattataataaatatcaccttataataaaagcagtgaagatggatttgtaataggaaacgtgttatgagtctatcgttttatacaaataggattggtctgttagtaagacttgctagtgaactattccgccatgcgtatttataccgttctccggacaggaggccggtatctatgtgcatggctttttttcgagtttaaaagatggaggggaattggaagtgacagacgttcagtctatccgtgtcaaaattgacggcacggagtatgaagcaccagaggggtctaagattttagatattttaaaccaaaacggaattgagattccgcaaatatgccatgtaccggaagtagatccgattcaaacatgtgacacctgtattgttgaagtaaacgggaaattgcagcgctcttgttccacggctgcagaaaacgggatgtccatctcgcttacgtcgggaagggtaaaagaggctcagacagaggccatggaccgcctgctcgagaatcacctgctttactgtacggtatgcgataacaacaacggcaactgcacactgcataatacagcggaaatgatgggaattgagcatcagaaatatccgtatacgccgaaagatgattcaaagtgcgcggttgatatgtctcacccgttttaccgctatgatccgaaccaatgcattgcctgcggccaatgtgtggaagtgtgtcaaaaccttcaggtgaatgagaccctttcaattgattgggagcgcgaccgcccgcgggtcatttgggatgaaggcgtccccattaatgaatcatcctgcgtcagctgcggccaatgtgtcactgtctgcccttgtaacgcactgatggaaaaatcaatgctcggccaagccggatttatgacaggaataaaagaagatgtcatggaaccgatgattgatttagtgaaaaatgttgaacccgactatacaagcatcttcgccgtgtcagaagtggaagcggctatgcgcgataaacggacgaaaaaaacaaaaacagtctgcacgttctgcggcgtcggatgctcttttgaagtatggacaaaaggccgtgacatccttaaaattcagcctgtttccgatgctccggttaatgcgatttccacttgtgtgaaagggaaattcggctgggacttcgtaaattcggaagaacggattacaaaaccgcttatccggaaaaacggcgcatttgttgaatcgtcatgggaagaagctcttgatcttgtcgcttcaagactcggttcgatcaaggccgaacacggaaatggttctgtcggttttatttcttcttctaaaattacgaatgaagacaactacgttattcaaaaattagcgcgtcaagtatttgaaaccaacaacgtggataactgttcacgctactgccagtcaccggcaacggacggcttattccgcacagtcggtatgggcggtgacgccggcacaattaaagatatcgcaaaagcgggcctcgtgctcatcgtcggcgccaatccggcagaaggacatccggttctggccacacgcgtgaaacgtgcacataagctgcacggacaaaaattaattgttgccgatctgcgcagaaatgaaatggctgaacggtccgacctctttatcagcccgaaacaagggactgaccaagtctggctcatggcagtgacaaaatatatgattgaccaaggctggcacgatcaagcgtttattgatgagaatgtcaactactttgaagattataaagaaacgctgaaaaagtatacattagaatatgcggagcgcatcaccggactttctcaggatacgatcatccgcattgccgaaatgattcgtgatgcagacggcacttgtgttctttggggcatgggcgttacccagaatacaggcggctctgatacatcagcggcgatttccaacctgctgcttgccacaggaaactaccgccgtccgggcgccggagcttatccgctgcgggacataacaacgttcaaggcgcttgcgatatgggaactcttccaggctggcttccggggtatcagcatattaccgatgatgcggcacgcgctaaattcgaaaaagcttacggtgttgaaattgacggcaagccgggtcttgataatattgaaatgctccatgcgattgaagaaggaaacatgaaagccatgtatctcgtcggtgaagatatggcgctcgtcgattcaaacgccaaccatgttcatgacattttatccagccttgatttctttgttgtacaggatattttcctttcaagaacggcgcaatacgcggatgtcatcctgcctgcggttccatctcttgaaaaagacggaacatttacaaacacagagcgtcgtgtacaaagattgtatcaggcgcttccgacactcggcgatgccaaacccgactggtggattattcaggaggttgccaatcgtttaggcgctgattggaattacacgcatccaagcgacattttctcagaaatggcgagcctttctccgctgttcggaaaagcaagctacgacgttcttagcggctggaacagcttcctgtggggaagctttacgggagagagcactccgcttctttatgaagacggctttaacttcccggacaaaaaagcccgttttgcgctgagcgattgggtggagcctgccgtattccctgaagaatatgacctgcatattaacaacggacggatgcttgaacatttccacgaaggaaacatgacaaacaagtcaaaaggcattcagtctaaagttccggatgtatttgttgaagtatcgccggagctcgcggctgaacgcggaatttgcgacggaacaatgatccggctcgtctctccttttggggcggttaaattgaatgcgcttgtgacagaccgtgtccgcgcaaatgagctttatctgccgatgaactctacagataaagattctgcgattaatttcctgaccgggcctgcgtatgattcacggacacatacacctgcctataaacagacaaaagtccgcatggaagtgctcggttcctgtgatacaccgccgcttccgaaaacgaatccgcggaacaaaaaacgtcatccgcaaaacggtgtggaagctcagcgaaaatggaaccgtccgggctatgtgcacctaactgattaaggaaaggaggaaacataatggcaagcccaattactgaaattcaaaaagaaacgaaaacagaggaacagctgaaagctgaaaaactggaagaactgaagacgcttctcgcagaaaatgaagaagccgtcgcgaaaacgatgtccattatggcagagctgaatggcttgggcatttttgatgccgccggctatatgctccaggcaaaagaggagattgccaaaatcgcactcggacagatttcccgggaacctgtcaccaatctcctgaatacgatgatggccgcgggaggcgcgctgtcaaaagctgatcccgaatttatgggcagacttttagaaagcgccatggccgggacggaccaggcgcaaagatttttaaaagaggacaggaaagtcagtatgtttgaactgatgaaagccgtcggtgatcctgatattaaccgcgcgctcggcttcgggctgcagtttttaaaaggaatgggaaaagaattacgcgaaaccccttctgaataagaaatgaaaaagccattgtcaaaagacaatggctttttttattcttcggcctcttccagcctctttttataaataagtgaacggtcaacgcagaaataagcgcccgctaaaaatgcacaatccgttacaaacatcagcattttctggcccgcagtcagcccttgtccgggaagaaccgcgccgatataaatgaaggtgctgactgcaagcagaataaatgcgtaatgcttaaaatcttctattaatgatttcagtcttttcttctccatataaggtcacctgccagttttatagtctaccaacattataatacaagctgacagccgacagagaatgtaaatctatccattctttataaaagggaatcaagcgcctgtttcacatccgccgttaaatcctcagtatcctcaataccgactgagatccgtacaagcccgtcggtaatgccaagcgcaagccggcggtcgcgcggaatcgaagcgtgcgtcattctggacggcacggagattaagctttcaaccgctcctaagctttcagcgattgtaaacaggttcaatttttctaaaaacgcgtcgacgcgttcactgctgccgatatcaaaggaaatcattccgccgaaaccggagctttgcgcttttgtcagctcatggcccggatgtttcgctgatcccggatagtagagcgtctgaacggcatcatgcgcttcaagcagctcggcgattttcccggcgctgtgattgatggcatccattctgagtcccagtgttttaatgcctctcattaaaagccatgaatcctgcggtcctaaaacgccgcccgttgagttttgcacgtaatgaagcttttcaccgagctctttatcagccgtcacaactaagccgccgacgacatcgctgtggccgccgagatattttgtcgcgctgtgcagcacgatgtccgcgccaaagctgagcggctgctggaaatacggcgtgtaaaatgtattatcgacgataagcaatacgcccgcttcttttgcgatgtcagacatcagtttgaggtcagtcactttcaatagcgggtttgtcggtgtttcgatataaatggctttcgtattcgggcgaatggcctttttgactttttcttcactgctcgtatcaacaaagtccgcttcaataccgaagcggttcagcacacctgtcatcacccggtaagtgccgccgtatacatcatccgtcaaaataacatgatcgccgctgtcaaacagcatcatgacggcagtaatcgcagccatgcctgagccgaacgcatatcccgccgcgccgccttcaagctccgcaattaagctttcaagcgccgtccgcgtcggattggccgttcttgaatattcataacccgtatgctcgcccgctttcggctgccggtacgtgcttacttgataaatcggtacggaaaccgctcctgttttttcatctcccgtaattcctccgtgcaccatcagcgtttttttcttcatcttactgacctccttgaaaaatgtttttgcttatatatcgatcgctgccgtcagggaaaatagtgacgatatttgatccggcgggcgcttttttcgcttcttcaagcgctgcataaagagccgcccctgaagagcttccgattaagaggccttctttctcggccgcttctctgacaagcgaaaacgccgtatcgtcttccactgtgtaaatggcgtcaaaatggttctcgtccatataatcagggataaactccatgccgatgccttccgttttatgggcatgcggctctcctccgttcaggatcgagccttccggttcaacgatcaccgttttgacggcaggatttttctcctttaaataagctgccgtaccggcaaaggtgccgccggaacccgctcctgcgacaaaggtgtggatatccccgccgagcgcgttccatatttcaggtccgatcgttttatagtaagtcaatggatttactcggtttttaaattgcagaacggcataagaattattaatctctctctccagttcaagcgcttttcgaatggctccctgcataccttcttctctcggcgtatgcacgatgtccgctccgagagctttcataatttgctgcttttctctgctgaaatgctccgggacgcaaaaaacggcgcgaagctgatgctttctggcgcacagagcgagtccgatcccggtgtttccggcagtcgcttcgatgataacaccgcccggtttcacctttcccgtgcgtagcgcatcttcaatgagcattccgcccagcctgtctttaatgcttccgcccggattcatcatctcaagtttagcataaaccgctgttccctccggtatatcaaaatgcttgagacggagcagcggtgtatttccgatcagttctgtaatatctgttatcacgttcaatatatgtcctcctcctggaaaagcggaggagaacgagaatcccccgcttagtgaattcgtttgatgacattcaggacaagctcagttgaatgaacggcagcctgttctaaaaatttatcaaatgaaacgtcagattcttttccggcaatatcagataaagctctgatgacaacaaaaggcgttttgaactggtggcacacctgtgcgacagccgcagcttccatttcaaccgcgtacaaatccgcaaatttggcgcgtacgtcttcaacccgcttcggatcattcataaaagaatctcccgtagcgattgtgcctttggcgacttgaatgccgttcagttcagaaaccgcttcctcagtaatactgatcagcttttcatcagctttgtatgctgccggaagacccggcacctgtccgtattcatagtcaaacgccgtcacatccacgtcatgatggcggacatctgttgagatgacgacgtcgcctacattcaatgtatgatgaaaaccgcccgctgagcctgtgttaatcacataatcaggtttgaaacggtcaagcagaagcgtcgtgctgatcgcggcgttgacttttccgatccccgatttcagcaagataacttcgacgccttcatagctgcccgtcgtaaactcacagtgagcgatcatctcttgttttgcgtctttcagtttgcttcttaaaatcgtaacttcctcttccattgctccgatgactgccagtttcatttatacacaatcccttcgatttaccgtttaatcgcctccattatccagacaaagtcattttgctgcgtaaaccgcgcggcaaatccctcttctgaaaagatgtttttcattgtcccgagtgtcggataatgttccgtctttaaatcgtccgctaattgatgatagccgtttcggattgcttttttaattgtttcatcataagcttcatgatctttaaagacggtatcggcaaacactattttatcatgcttctgaaggattgtgccatattgctttacagccgcttgcttttcttcatcggttaaatgatgaaaggcgtacgagctgacgatggtatctatttgaaaaggcggagcgggaaactccagaaaatctccgtcactgaacacggctttgtcagaaagcttgtcagccgccagttttctcattgacggagacggttctacaccaaacacctttttgttcgcggcggctaatttcgccgttaaattccctgtgcccggtccgaactctaaaacgttagaacccgaaagtgcgacgatgctgtcaagaatattgtcataccctttaaaaacatcagcgtattgtttgtctgccccgtgcactgtggcatcataagtcgctgcccaatcttcaaataatggaataaattcacggcccatatttttcactctccataatttataattcctatgagtatagtatggattaatcgtggaacagttcctatcctatcacaaaaaagaatggaagggtactaaaatactttgggattattgcgcaattacggcagaaaggcttatactttcattgactcagaagaaaaatcaggaggatctgtactgatgaattttcaattggatttaatcaaagataaagtagaatttttcgaagcggcatctttgcaggagcttgaaaagaaaataaacgttcagattgaaaacaaccaggcgattatgcttcgcgtccgttctgtatcccatcaggtgacggccgttgacggcagaatcctttacagcgcgtcggtgcatttttcagctgacgtatgacagaaaaaagcagctgaataatcagctgcttttttgcggttattttaacgtttctacttttgtcggcttccagccttttttgtctttccaagtgatggtgacctgatactttttgccgttcgttttgtctaaaactttacccttcgcatcttgcgggcttccattgtttccgagccacagcactgtcatgtgatcttttgacacgcctgttgcgtaagagatggcgtcaagcatttcggaccagtcttcagagcttgagtcatacgtcgccgcatgttctcccgtctgctttgttccgaccgctttccattttgggttaacaattgttttctcaacatcgcttgatgagccgccctctgttatttttgcgcctttaaaaggatcgcttgaatcagagtcttttttgctgctgtcatcacttttcgatgaatcatcgtcttttttgctgtcagagtctgaagatgaatcagatgtgtccttatcctgtttatcttttttgtcatcgtctgatgccgtatcttttttgctgtcttttatgtcttcatcggatgtctgcttcgtcttgcctgatgcaggtgtttcctgcttctggctcgtgtccgctttttcgctcacgtcgctcgacggactgttgatgaagaggctgactgcaacgacgacaataagaatagatacgatagcaattaaaatgttaagcaccatatttgcttttctgcgcttatcacggttttcaaaacgagattgtttattgctcaatcattctgcactcctttatccctcttgctcagcatatattttaacatgggctgagcggttgttctatgtctgatttgtttcattttcatgtacctttttaacaatatcataaaacactgtatttgtcagagccttatcccccggcgtgtccatgtgcagcaccacgagagcgtatttcggcttgtccgcgggaaagtatcccgcaaaccatttgtggtaaagcgtctgtttttcttttgtgaacattcccgtctgggcagttcccgatttgcctgctatctcatacggcagatcctgaaaccttcggccggttcctttcggtgaggtgacgacttctctgagaattttttgaagctgctgcgccgtatatttgtcgatgttttccccttttaacggctgttctttgaatgacgccatcgtcgttttgtttttgtattcaattttgtccgcgattttgacttgttttttctcaccgccgcgcgcgatcgccgccatcatattggcgacttcaagaggcgtgactttcacgtttttttgcccgatcgccgtctgtgcgacggctttttttacggttttgtctttgtcatctccccaaatgaccccgcttttttcattatacagctgtctgaatccgtcttcccggtacagcttgccttcccagcccgcccgctgtgtgagacctagtttctccgccatgttttcaataacggaatcatcttttttgattaatttttccgcaagacttgtaaacgtataattgcagctttgggcaaagctttctccaaaactgagcgtgcctttatcatcccccggctctccgtacaggttgagattgcagttaaaggatgtgcccggcttcacttcgttttgttctattgcggctgcggcgatcaccgttttaaacactgatcccggataaatcggcgtcagcatgtaattttgcagtgtctgctgctttgacatgtcggcgtcaggctttgataccattccgagcacactgcttttttcaatgtctaaaaggacggctccccccttttttaacccgcggtctttcaatacatcttccattgctttttgaatattgcggtcgatggaggttttgacttgcagcggataaaacgcgtttgcttcagccgtatatttgacgtccattccgaataaagggtttccccttccgtcgacatgatacaaaagttttgtgtcctgatccgccagtaaaaactcatcaaatgtccgctccatcccgcttgtcccgatttttgccgtgatcggcagttccttcctgccggggtatttctttttcaaaagctcagggtcctggtttgtcgcgcccaacagatgagcggctatgtttgtttctttgctgtctttcatatatacgccgtaaatgccgggatatttcaaagaattgatatttgccacggattgtttcgtcaaatgttttatttttctgctgttcaggatcaccggtttttttgcttccgtcagcagctgcctgagctccccctgtttcattccgagaatgtctgatacccggtcaaccggccaatcctgcgtcacgagaaagggaaacagtatgacggcaggctgcttttttccggtcagttctttgccgttccgatcaagaaaagagccgcggccgtctgaaataaggacttcttccgtccgctgcttgacgctttcctgaatcagattaatattggattttgaaaaagattctgtaaaaaacagctgaatttcagccagccttgcaagcagaaagaaaaacacgagcagaaaacaaatcacggccgttttcagcctttttgatacgatcataaaaaacacctcatccacattttggacgaggtgtttcattgttaaacggatcttatgaaattttcacaattttcacgagcatttctccgcccggcgtctgaactgtcacttcttcgtccacttttctgccgagcaggctttttgcgattggcgagtcgtttgagatttttccttcaaacggatcagcttcagcgcttccgacaatcgtgtaagattcttcttcaccgtcgggcaattcgatgaatgatacggtttttcccaaaccgactacatttgaaccgccgtcgtcctcgatgattttcgcattgcggatcatgttttcaagcgtcgtgatgcgcccttccacaaatgcctgttcttcttttgcggaatcatactcagagttctctgacagatctccgaagcttcttgcgattttaatgcgctctactacttctttacgtttaaccgttttcaattgctctaattcttgttcaagtttttgttttccttcgtgagtcatcggaaaaactttttcttgtgccatgttccttcactccttggtggttgtccctcaacaataacgtgtgattatgtatgagagcataaacgaaaaaatcaagaatgagaacacagggcagtcctcgttcttctctcccatataggtactgtttatcttaaactgaatgtgtgttttctgcaaatgtttcggtttataaacagggaaagaagggaactgtctcattcccttccagcctatacataatatggtctgagttatttatgtctatgctatggtattacaaaattgcattttgttcaaggatcgtttgaatcttcgtgaccatcagatcaattgcgacgtggttttgtccgccttccggaataatgatgtccgcgtagcgtttcgtcggttcaacaaactgattgtgcatcggtctgacgacggacacatactgctcaatgacagaatcgattgaacggcctctttcgttaatatctctcataatccgtctgatgatacggagatccgcgtccgtgtcgacataaagtttcatatccatgaggtcgcgaagtcttttatcttcgagaacgagaatgccttccagaataatgacatccttcggctcaaccggaatggtttcctcagaacgcgtatgcagtttataatcataaatcggcttttctatcggccggtaattcaaaagctcttgaatatgctcgattaaatagtcattatcaaatgcgagcgggtgatcatagtttgtgttcagcctttcttcaaacggaagatggctttggtctttataataaaggtcttgctggatcattaaaatcgagtgtcctttaaactgttcatagatggaacgggtgacgcttgtttttcctgatccggaacctcctgcgatgcctataactacaggactcttacccattggtgattacttcccctttctcatcatgttgctcggataaatctttttgtctactttaaatctaacgatttgcaggggatggcgggcagcatcaagctcgtttccgtcttcgtcccaaatagtgccgattgtgaatgtgaaattgtcgatttcaggaccgaaaaattccacttcgtcaccttgtttaaagaaattgcgctgctggagcgtcaccatttgagtttcctcgtcatacgcgagcacgagaccggcaaaatcaaatgttgttttctttccgtgttcgccgaacatctgctcttcatacccgggcgtgccttcaaagaaagcaggcgcggtatcccggtttgcacatttgtccagctcatccagccattctttttgaatgacaaagttttcaggatcagcgcagtatgcgtcgatgactttgcgatacacgctgacaaccgtcgcaacgtaatgaatcgatttcatccggccttcaattttcaggctgtcgatacccatctcaatcatttgcggaatggattcaatcaattttaaatctttcgggctcatcgcaaacggagcgtcttcttcgtcataaagcgcgaccgcgtttgcaccgtctgtctgatacaggtcataatcccagcggcaggactgacagcagccgccgcggttggaatcccgggctgtcatgtgattgctcagcacgcatcgtcctgaataagcgatacacatggcgccgtggataaaggtttcgatttcaatgtccaccttttccttcatttctttaatttccagtccgctcgtttcacgggcaagcaccacgcggtcaagcccttcttctttccagaactgcaccgctttccagttggaaagggactgctgtgtgctgaggtgaatttctacgtccggggccactctccggcatgtttcaataatcagcggatcagcgacgataattccggcaacttttgcgtctcccaacgcttttaagtattcttccagaccgtccatattttcattatgggcgaaaatgtttgttgtcacatatatttttgccccgtattttttggcaaattctacgccctctgcaatttcttctattgagaagttatccgcatttgagcggagtccgtattcctgtcctccgataaaaaccgcgtccgctccgtaatgaacggcaatttttaatttttcaaggtttcctgccggagcaaggagttcaggttttttcgtaatgacgcgttttccgtttacgactttggaaatggtttgatttacggctgtcatccgttgcaccctcctttttaatagaccgtttctttaaagaagaatcctgtgtcgatgcttctgttcacaggctgaatgctttcaatccgctctatccagctctcttttttctcttcgtatgtctctcggctttcgaagcacagatcgattgcttctctgtacatgcgggtcacttcagttaagtattcaggagacttcaaaactccgtcgattttgaaagaatcgatgccggcgtccatcaggtcctctaattcatcaatcatgcacacatcgttcgggctcatgatgtgcgtgccgttttcatcttcaaaaatcgggtatttattgccccgttccttgtcatgcagaaacattcccgcttcttttttcttctgttcgatgtccatgacttttccctggtattcgaagtaatggcccactaaagaacgctttgattggaacatgcacgtcatgccgtggatttgaatttcaatttcaacttcggcgttttcttttatgtcaatgatgctgtccatatttaattccttagccagcactgcccgccgtgcgcctttgcgtccccagtaattgcaggaatagtagttggtacccgttgtttccgtgctccagtgcagtttaagatcgggagccgcttcacgcgccgccattaaaacggccggatcaccgaaaacagccgcatcaacgccggcctcctgcaaaaaggcaagatagccgttcagctcgtccactttttcgttgtgaaaaatagcattgacggcggcgtacactttcgcgccttcctgatgagctgtctttacggcttcttttatatcttctcttgaaaattcaccggccagtctcaggccgtatctctgttctccgactaacagggccgttgcgcccgcttgaatgagcggaagaatatcctgtacagaagtcggagtcaccaaaagttcaggttttttcatgatcattcacctcttctttttactgatggcgatgccgtctccgaccggcagtatgaccgtttgatagtcaggccggttcatcagccattggttatattgatcaattttttcaacaagcttccgtcttcttttcggctcaatgtccgagtgattttgtgccaccagtcctttaaacagaacattgtctgtaaaaatgactccatccggcgcaagcatcggttcatagagctcaaaaaagttcgtgtactggcctttggccgcgtcgataaaaatggcatcataaggagccgtgacacggacagactcagaaagttccagcgcatccccgtgcattacgtgaacccggttttccatttcaaagtcttttatattgttcacagcttcttcatagcgtttgtcgtcccgttcaatcgtgtaaatattcgcatccggaagctcaagcgccatccgtatggcggaatatccgattgccgcgccgatttccaaaatgtttttcgcctgttgaatcgacagcatttgaagcagcacttcaatgcccgcttcttccataatcggaacatggtgctcttttgcataggcttcaagctttttcactttatcaggccgaggcttcagcatcgcgtttatatactcgtttatttgttcataccgatcattcacggcaaacagcctccgttctaaaaaggagtgcccctgacgaatccgcggggacactctcttaagacacttctttatccataagtaaacaacccgatatattttatcataaaacctttcagaatggaataaaaggagagcttttgccctccttttattcgctgtcttttttggaaatatacttttccttcgctttattatggtcttttaatgttttggtgaaaacgacctcgccgtttggttttgcaaggaaatagagataatccgttttgtcagggcggagagccgcttcccatgatgaatcaccggcatttgcaatcggtcccggcggcagccccttatgtttatacgtattaaacggagaatcaattttcaggtctttgtagtagacccggcttttatgcttaccggccgcatataataccgtcgggtcagtctgcagcggcattttttctgcaagcctgttgtaaaaaacgctggcgattttgtgacggtcggctttggcggtggcttcttcttcaataagcgatgccatcgtcagcgcgttatggacggaaagtttctttttttccagttcagatttatacgtttcgatacgggtatttgtttcctgaaccattgccgtcaaaatcgtgtcaagcgatgcatccggatcattaaacggatatgtggccggatacagatagccttcgagcggatgcttgagcttcttgtttgaaagtgcgtccgttattgtatcaggaaactgttttttcagtttgccgatgaatgttttgtcatccagttttgccatgatctcttcttttgaatatgatgtttcttttgcgatcgcatccgcaatctgtgtaagctgttttccttcaggaacggagatctgaaaggcatatcccgttgatcccgcggtcagttttttgataatcgcatccgcatccattcctttattcaggtggtaaaatcccgcctgaaacccggaagcgcctttatacttcacatacagctgaaatgcttttttgcttttgatgacatgctgatcctcaagaatttcagcgattgccgaaacggaagaaccgctcggaatattaatattgactgccgttttgctgcctttgtcaaccggggacagcagagattttccatagaaaaaagcaccgcaaatgatgataagcagagcgatcacggaggacagtattatcgttgtttttttgtttttacgcggaaatgaatttttagtctgattgatattcatacaagtattttcctcccaacagctcttatactacatgattcatgtgcattcggcaatttattacaaaaaaaagccgaagcgcatatgcgctccggctttttccgttcattttattcttcgtcttcttccgctaaaaacgtgttcagcgtttcttcgatcatttcccactcttcatcggtttcaatcggcatcagttcgccgtcttcaccgttttcgttcggttcgaagcttgaagcgtgaatttcaatttcatcatcgtcttgagcatcaatcggataataaagtacgtaagatttgttgaatgtgtcgttttcaaatgtgaacagcacttcgcaaagctgttcgttgccttgatcatcgacaattgtaatatgtttttcgccgtgttccatttctttcacctcttagtttaaactgtccagatatccttgaaggatcatgacagccgccattttatcaatgactttttttcgtttttgcctgctgacgtcagccgcgatcagcattttttcagccgccatcgtcgtcagacgctcgtcccacagcacaacagggacattgtacgctgtttcaagcagtttcgcaaatgtttggctggcttcgcctctcggaccgatcgtcccgttcatgtttttcggaaaaccgagcacgatcttctctacattatagtctttcatcagctcggataaacggtccagaccgtaatctccttcagcctcgtttatttttatcgtctcaatgccctgagcggtccagcccatttcatcgcttaaagctacgccgagtgttttcgttccaagatcaagtcccaatattctcatgaatgtatttacgcctctttatgctgttctagataggattttaccaattcctcgattaattcgtcacgttccagtttgcgaattaagttccgggcgtcgcgatgcctaggaatgtatgcaggatctccagacagcaagtatccgacaatctggttgataggattgtaccccttttcctgaagcgcatcatataccgtaatcagcacttcttcgacgtttgtttcagcagaatcatcggagaaattaaatttcatcgttttatcaaacgagctcaccgttttgcacctctttcccaaattcgcaggcaaagttcagcctgaggtcctcatcttatcatcattctacactagttgaaaggattataaaacggattttatccaatcttccgcagatgcgagcgcctcttccaatttttcaggctgctttccgccggcctgcgccatgtccggacggcctccgcctccgcctccgcagacttcagccgcttgtttgaccattttgccggcgtgaaggcctttttcaatcaggtctttcgtcacgcctgctgaaaggttgactttctcgttttgcacggcgccgagaatgatgaccgcagaaccgagcttcgctttcagatcatccaccatagtacgaaggtggttcatgtctttcgcatttactttttcagccagcacttttacgccgccgatgtcttttacttttgacagaatggctccggcttccacattgccaagtttgctgagcaatgattcattttctctttgcgcttccttcagctccgcttgaagagactgaattcgcttcggtacgtcttttacgtttgatttcagctcatccgcagcgtgctgcagaaggctgagctggctgttcatttcctgataagcgccttttcctgttacggcttcgattcttcgcgtacctgcgccgatccctgattcggatacgattttaaacagaccgatttcagccgtattcgtgacatggcatccgccgcaaagctcaaggctgtaatctccgacttgtacgacgcggacgatatcgccgtatttctcgccgaacagggccatcgcgcccatttctttcgcttcattgatcggtttcaaatcaatcgctaccggaatgctctcccagattttttcgttgacgattccttcaatgcgttcaagttcttctttcgtcacttgaccgaaatgagagaagtcaaaacgcagacgattttcggtaacgagtgaacccgcttggttgacatgtgtgccgagaacgtctttcagcgcctggtgcagaaggtgggttgctgtatggtttttcaccacaccgcttctcatttgatcttcaacttcagccgtcacgcttgcgcctttttgaatcgtgccgctatccaccgtgccttcgtgtacatgctggccgttcggagcttttttcacgtctttaatggttacgacagcctgctcgcttctcagcactcctctgtcaccgatctgtccgccgctttcagcatagaaaggcgttttgtcaagaagaatttggacggtatccccttcatgcgcctcgctgattaattgcccgtcatgaagaagctcgatcaccttcgcttcagcttttacggcactgtagccgacaaatgtgctttctgcggtaatgtcgcgcaatgcgccgccctgcacctgcatgcttcctacatcttggcgcgcatttctcgcccgttcacgctgtttttccatttcggcttcaaagcctttatggtcaaccttcatttgctcatcttccgcgtattcctccgtcaattcaaccgggaatccgtacgtatcgtacagtttgaatacgtcttttccggagatgatgccgctgcctttttccttctctttctttatcacgtcagataaaatggccagaccttcgtttaatgtttcgtggaagcgctcttcctccgttttgatgactttggcgataaactcttgcttttctttcacctccggatagaaagcgtccataattcctgcaacagtcggtaccagctcgtacataaacggacggctgataccgatggttttcgcgtatcgcactgccctgcgcaagaggcgtctcagtacatacccgcgcccttcatttgacggcagagctccgtcgcttaccgcaaatgcgaccgttctgatatgatcggcgatcactttaaaggccgtatccttcattgcgtcctttccgtaagcatctccggaaatgcgctctgttgcttcaataatcggcataaacaaatcagtgtcaaagtttgtcgggacatcctgaatcacggagaccatccgttcaagccccatgcccgtatcaatgtttttcttcggaagcggtgtgtacgtgccgtccgggttgtggttgaactctgagaataccaggttccatacttcaagatagcggtcattttcgccgcccggatacaattcagaatctgacgggtcattaccgtatttctcgccgcggtcatagaaaatttccgtattcggtccgctcgggccttcgccgatatcccagaagttcccttccagacggatgattctttcttccggaacgccgattttttccgcccatagcgtataagcttcttcatcctcagggtgaaccgttacagacagcagctccggatcaaagccgatccacttttcgctcgttaaaaactcccatgcccacgtgatggcttcttctttaaaataatcaccgatggaaaagtttccgagcatctcaaagaacgtgtggtggcgcgccgttttccccacattttcaatatcatttgtgcggattgatttttgcgcgtttacaattctcggattctccggcacaacgcggccgtcaaagtactttttcagcgtcgcaacgccgctgttgatccacagtaaagacggatcttcatgcggaaccaatgaggcgctcggttcaacggcatgacctttttctttaaagaaatctaaaaacatttgacgtacttcagcagaagttaagtgtttcatctatattcctccttatcactacccgaaattctcttttgcgacagcaaaaaagctctctccctatgcaaaccatgcgttcacacagggacgagagctgtctcgcggtaccaccctgattacaggccgaaaaaggcctgtcacctttcatcccgtaacgcaggattgcggcagcctttaactgcactcaggattagcttcggccgatcttctgctgaagctcctctcagcgtatcggagcttctctcttaaacagggcttcggcgtactcttatccgtcactcgagattcgtatgtattctactcgaaattatagacaagcagaacccgaatgtcaatgttccgtcctgatccgcaaaaagtgaatggccgtcacttttaaaacggctgccgccggaacagcgagaatcatgccgggaatgcccgcgagctctcctccggcaagaagcgcaagcatgatcacgacggggtgcattctgagacttcgcccgacaatgagcgggctcaaaatgtttccttctataaattgaagaataaaaatcgtgacgattacgatgatcacagccttggaggaaatcgccagcgaaaggagcagcgccggcacagcgccgataaacgggccgaaatacgggatgacattcgtaatcccgatggcaaggcccaaaatcagcgggtaaggaagcccgaagagccaaaatgaaacgccggctattaacccgagcaaaaaacaaacgagaagctgaccgcggatgtaatcaccgagagagtcgtccacatcccgcagaaattcactccccctttttctccaggacttcggcgtcaaataccagaccgtctttttcatgacgcctatatccttcaccatatagaacacgagaaaaggaatcgtcgccgcgatcaggatataatcaagcacgaaacggatgcttctgatcgtgctttcaatcgtgccggcaagaaacgtttctgtctgctgaatcattttgtccatccgatggtgcatgccgtcaggccaatgatccgtgtgattatgcagatgcctcagcatgctgttgtagttttcggcaagaccgggaatgctctcagacagatcctgcagctgttcaattaaaacaggaacccctttataaaccccccagccgattccgccgaaaaacaggcaataaatcagaagcaggcttaaagttctaggcatcccttttctatgaagccattcagtaatcggaagtaaaagataagcaataaatactgcgatgaatataggaataaagagagattttataacaagccaaatgggagaccataacatatcgagcatgcaaaagacatacactgttaacaaaacgagcagacatacagctgtccacattaagagctgcagcggtttttgaagcatgacgtttcacctcttgctttatcttttgacagaaagccggaattattcccgtttcataaactacgccttatgacgcagacctcttgacggaaataattatcagaaattacgaaataatctaaataatattcataaaagtctgtataaccatcgtaatgtgttaaaggatttcaaaactgtccagtcaatatgactcatgtttttttaaggaggatggccatgatttcatttcaggatgtaaataagcactacggacatttccacgtgctgaaaaacattaatctgcacattaaaaaaggggaagtcgtcgttatcatcggaccttcaggatcgggaaaaagcacgcttctccgctgcattaatcagctggaaacagttgatggaggcgccttaacggtaaacggcgtctccatccgtgacaagaaaacggatataaatcaggtccgccggaatatcggcatggtgtttcagcattttcatctgtacccgcacaaaaccgttctgcaaaacatcatgctcgcaccgatcaaagtgctcaagcaatcaaaagaagaagcaaaggaaacggccttatactatttgaaaaaagtcggtataccggacaaagcggacgcttatccttcacagctttccggcggccagcagcagcgtgtcgccatcgccagggggcttgcgatgaagcccgaaattatgctgtttgatgaacccacatccgcgcttgatccggaaatgatcggggaagtgctggatgtcatgaaaacactcgcaaaggaaggcatgaccatggcagtcgtcacacatgaaatgggattcgcaaaagaagtggcggaccgcatcgtgtttatcgacggcggatccatcttagaagaagctgcaccggctgaattttacgaaagcccccgtgaagagagggcgcgtttattcttaagccgtattttaaatcactgaaaagaaacggaggagcgcttatgtcacgcgcaacaaaatggttgtcattcggattgatatcactgctggccgtctttatgctggcagcctgcggagggaaagaaacgtccggggattcaaaaggaacgggaaaagacacgttagcctctattaaagacagagacaaaatcatcttcggcgtcaaaaccgatacgaggttattcgggctgaaaaacccaagctccggtgatattgaaggcttcgatattgatatctcaaaacagctcgcaaaagatattctgggggatgagaagaaagcggaatttaaagaagtgacgtcaaaaacgaggattccgatgctgcaaaacggcgatatcgacgccatcaccgccacgatgacgataacggatgagcggaaaaaagaagttgatttctcagatgtttattttgaagccgggcaatccctgctcgtcaaaaaaggaagcagcatcaaaagcaccgaagacctgggaaaaggctcaaaagtattggcggtaaaaggctccacttcctcacagaacatcagagaaaaagcgcctgacgcctcagtgctggaatttgaaaattacgccgaagcgttcactgcgcttaaagcgggacagggagatgcgctcacaaccgataatgcgattttatacggcatggccgatgaaaataaacaatatcagctgacgggcgaaacctttaccgatgaaccttacggaatcgccgtcaaaaaaggccaatccggccttgtcaaagaaatcaacgcctctttgaaaaaaatgaaagccgacggcaggtacgaaaaaatctataaaaaatggataaaagaagaaccggcaaaataggacggaccgcgggatgagcatgcatgctcatccccgttttataaggagtgacatagatgaacttttcaattttaacggaaaacttcgatatgtatatggacggtttcctgcacacattgcttgcgagcttcatcgcgctggcaggcagctttgcgctgggcgttctgatcgcagtcatgagaatcacggctttcaaaccccttcaatggatcggcactgcgtatgtggaatttatccgtaacatcccgcttctcctcatcacattcgttttttatttcggacttccgaacgccgggctgagactggacggctttcaggcgggaacgattgcgcttacgatttacacgtccgcctttatcgcagaagccatcagagccggaattcagactgtccccaaagggcagatggaagcggccagatcgtcaggcttcacctacagtcaggcgatgagatatatcattcttcctcaggccgtaaaaatcgtcattcccccgctcggaaaccaatttctcaaccttgtcaaaaactcatcaatactcggagtggtggcgggactcgatttgatgtatcaggcggatctcgtgtcctcgagcactcttgtcgtgtttgatgtctatattttcgtcgcgcttttttatttgatattaacgatcccgctcagcatcggggttcactatttggaaagacgtctcggaaaaagttattagagaaggagagtgaataacatggattttagcggcgcctatacacctgaccatctgctgtttttatgggacggctttttggtcacactttatgttgcgctgatctccattgtcctgagttttatgttcgggcttgccgccggcactttgcgctatgcgaacattcctatcgtctcgggcattatagcggccattgtggaaaccatccgcaacctgccgctgttattaatcattttctttacgttttttgcccttccggaaatcgggatcaaactggaaattaccgcggccgccatcacggcgctgacgatttttgaatcggccatgctgtcagaaatcatcagaagcggtttgcaatccgttgacaaaggacagattgaagcggcgcgttcttcaggactgacgtacacgcagactctttttctcgtcgtcatgccgcaggcgctcaggcgtatggttcctccgattgtgagccagtttatctccttattaaaggatacgtcacttgcggtcgtcatcgctctgcccgaactgattcataacgcgcagattttaaacggacaaagcgctgacggggggtattttttcccgatctttctgctggcggccctgatgtatttcgcggtcaattacagcctgtctctcgctgccagacggctggaagcgagacaaacgtaaaaaggatacttccggagaagtatccttttttccgcttaaaacattttcatgactcgtcttctcatccgtttcataccttttttattcagcatatcggactgagaagccatacgatacataacggctccagcccctaaagccaacagagaggtcattgttctgcccatcgcgcgtatctcctttcaactttaaaaattgatactgcgttcgtcttcagaaaacaaatcatcaagactgcttaacgtgccgtcttcctctacttgatgtgtcgcaattttgcctttggccaccgtcagctcaatgaagcagccccagcaatagtattggtttacgccgattttgccgatatctttacttttgcagttcggacatacaagcacagactacacctcttatccgttcaggacgatgccttctttccccgcttcaataagcatatcggcggcgcggcgcacttggcgtctgccagccagatctgaaaagaagccgtccgagagttcatatgctacgattatgcccctgtccaaacaaaagtatacatcttccagcaaaccgaacatttcaccatcaggcgatttcaccggctgcattttaatctgttcaaaggtgaaacagctcttcggcaaaggctgcaaatgagcatgaccggcagctacggcttcttgatccatctcttttatatcacttgcccctaaaaaaagatgacggttgtgaaacaggcgtttctgctccagcacgaaaccgagaaaccggccgtccagagagaaacatacatccgatatcatcccgagactgcgcccggtgttttcgtcatatactgttcgtccttcagctgcatggcatgttctcaaagtgtgatcaaccaccttttgttgaacacgtataggttttgccaagaagccaggcagcatactttgaaatgacttccacaggcgaaaacccggcgcatgaacatgtgccgggttttatttacgctttttcttccataaagtcaaaaggcgtgatgccttccattccgatgttcgcatcatatacactgaacggcagctctttttgcagggcggccagttctgcatccatctcttcagtctgctctgtgagcctgtttttaagcgacgtctgtctgacggtggcatcattgtttttgacgccccattcaagcgcttcttcttctccgcaaagaatcagaaattttttcgctcttgtaatggcggtataaagcagatttctcctgagcattcgatagtagcctttgacgacaggcaggacgacaatcgggaattcgctcccctgcgacttatgaatggaacagcagtaagcgtgggtaaactggctgaaatcctttttcgtaaaggtgatttcgttgccgtcaaacgagacgacgaccatgtcttctttttccgtattttctttggcataaaaaatggacacgatttcgccgatatcgccgttaaacacattgttttccggctggttgacaagctgcaatattttatcgcccgtcctgtagacgacatctccgaatttcagctcccgccttttttctttaggcggattcatgatgtcctgaagaagcatattcagctcgttaattcccgcttttcccctgtacatcggggcaagcacttgaatatctctggaggtataccccttttttaacgcattcgagacgacctgatccacgacttctttaatctgtgaagaattacagcggataaatgagcggtcctttgtcggcgcggtcagcccctttggaagcagtccttttttcatatcatgggcaagttccacaatggatgatccttcagcctgacggtaaatatctgtcaggcgcacggtcggcagcacttcagaagccaaaagatctctgagcacctgccccggtcctactgaaggaagctggtcttcatcaccgacaacaatgagctgaatgtgcttaggaagcgccttaaacaaatggctggcgagccagatatcaagcatactcgcttcgtctataatgatcagtttcccttcaatcggctgatcttcgttgtaggtaaagccttcagcgccattccagccgagcagcctgtgaatcgtaacagccggcagacccgtagattcgctcatccgttttgcggctcttccggtcggcgcggcaagcagcaccggaaacgcctcgtcttttttataatcaccggggtcaagggatacgccgtgcagttcactgtataattccacgattcctttaataacggtcgttttccccgttccaggtccccggtcagtaaaagcatcggtgaagacagcgctttttgaatggcatccttttggcttggtgcgtattgaacattcatccgttcttccagttcaccgagtgcaagcagaaattccgattcaggaaattgatcggcatactccgtctgagccgcaatgtcgagcacgcgttttgcgacgttttgttccgcgtaaaacaaggagggaaaatagcagcgctctccttcgatgacgatatccttactctccccgagggcgatgatgccgtcagccgcatccatttccgtgacgcggccgccttcagctgactgattcaggagcgtttgcgtattgataatcagctgctttgtctctatgtacgtatggccctctgaaagacaggtcgattcaatcgtatataagattgccgctttgatccgctccgggtggtttcctgacagacccatttttccgcccagctcgtcagctttcacaaagccgatgccttcaacgtcttttacaagctgataaggattttcctgaattttctccaaggtttccgtttcgtaggcctgatatattttcatggatagctggggcccgaaaccgtattggttcagagagatcataatctgttcaagcccctgatgccgctgcagctctcccgccagtttgtccgctttcttttttgacattttcggcacatcataaagcaccgacgcatcagccagaattttattgagcgcgccgtctccaagctttttgacgatttcttccgccgttttttttccgattccttcaaacagatcacttgataaatagtgaatgattccttcttttgtggtcggaatttcttttttaaagtgttcagcctgaaattgcaggccgaacttaggatgcgtggcagtttttccgtaaaatgtgtaggtctcatcttcttgcagcagagggaagtagcccgttacggatacgaccttgtcttcgatcgcctcagacgtttctgcaaccttgactttcagcactgtatacaggttggtgtcattatgataaatgaccgtatgaatgacgccttttacatacggctgttcttcgatgttcagctgatccacgagccttccctccttttgttatgactgggtgataagctgtttcgcatgaagcgcaagcatatgatcaggctgtatgccgattgcgccttccagcatctcaagcgccttttcacgattttctttgtacgcgtaagcgaccccggcattataaaatgcgtccgcgtggcctggatcctgctcgatcaccgtctcaaactgcgcaagagcttcatccagcatttcttcatttgcaagacacattccgaactggaagcgcgcttccgtgtcattttcgtttaattcaacggcacgctgcagatacggcagtgcaagcttcggccgctctaatttaacgagaacggtccccagcatataaaacaaatctccgttttccattccggagcgaagcgctttttcaaacatatccttcgcttcggaaaacgattctttcatcacatatacgtttcccgcaccgtaataagcggctgccgccgaattgtccaattcaagcgctctgttatagaatgcaagcgcccgttcgagttcgttcacagaagaaagcagatttgcgaagttgatgtacggcaccgggtcttggccgttttcctcaatcgctttcgtaaaagcctctgccgctttttcaaaatcgccctcctgcatggcgtcaatcccgattttattataatccatttttaacttcctttcgctaaaaaaccccaacatgcgagttgaggttttttacatgtgttatacgtaccacagttttgttccgtctttataaacgtcatctatcgttccgccgccgaggcactcttctccgtcataaaaaacgacggcttgtcccggcgtaacggcgcgtacctgcccgtcaaaaatgatttccgcttcatcatcacccgtcattttcaccgttactttgtgatcttcctgacggtagcggaatttcgccgtgcatgtcatttcgccgccgtccatcagaccgggacgcgtccagctgacatttgtcgccgtgatcttatcggaatacagaagcggattatggaatccttgatcaacatacagaatgtttttttcaagatctttaccgacggcgaaccacggctcgccgcttccgccgattccaagaccgtggcgctgtccgattgtataatacatcagaccgtcatgacgcccttttatttctccgtccattgtcatcatatcgcccggctgagcggggagatattggctgagaaacgttttgaagttgcgttcgccgataaagcagattcccgtgctgtcttttttcgcagctgtcgcaagttctgcttctttggcaatttcccgcacgcggcttttttgcagatcaccgatcgggaacatgactttactgagctgttcctgattgagctgattcagaaaataagtctggtccttgttttcatccagaccgcggagcatgcgcactgtatctgcgcttctgtccacgcgggcgtaatggcccgtcgcaagataatccgcgccgagtgacagagcatgatccaagaaagccttaaacttaatttctttattgcacatgacatccggattgggggttcttccggctttatattcatcaaggaaatattgaaataccttttcccaatattgcttctcaaaattgacggcataatacggaattccgatctggttgcagacccggatgacgtcttcataatcttccgtcgccgtgcaaaaaccgttttcgtccgtatcatcccagtttttcataaagattccgattacatcgtagccctgctccttcagcagaagggccgccacggaagagtccacgccgccggacatgccgactacgactcttgtatcctccggccgtttttccatttgcattcactccattaaaaacataagtccgccgttttaagcaagccgtttaacgacggcggcaagcttttcggcggctgtttcgatttgttccgccgtattgccgaggccgaagctgaggcggattgacgaagtcagcctgccgctctcacttccgaacatggccgtaagcacatgggacggaagaacggatcccgccgtacaagcagatccgctggagacggcaatgccttccatgtcaagattgaccagcagcgcttccaccggcacaccgggaaagtaaaggtttaaaatatgaggcaggcatttctcggcatctccgttcacctccgctgtaacgccggcttcttccagcgtgctcatgatgatgttcttaaactccttatacttcgctgttttctcttccctctcacggtttgaaaggacgaccgcttcttttaagccggcgatgcccggtacattttccgtccccgcgcggcgctttcgttcctgctctcccccaagaagaatcggtgacagcttcacctcttgatttacatataaaaagcctgtccctttaggcccgttaagcttgtgaccggaaacagacagcatgtcaattctgctttttttcacatcaatcggcatataaccgaatgcctggacggcatctgtgtgaaaataggcctgatgcccgcttaacagctctccgatttcgtcaatcggctgaatggttccgacttcgttattgccatacatgacggtaacaaggattgtatcatcacggagcgcttctttcacctgatttgcactgatccgtcctgaagggccgggcatgaggtatgtcacctcaaagccgtcttcttccagcttttcgcaggcgtgcaatacagcatgatgctcaacagcggtcgtaatgatatgctttccttcattcttccgggcggcagccgttccgaaaatggctaaattatcagcctccgtaccgccgcttgtgaaaataatttcctgttctttcgcactgatttcgcgcgcgatgtccgctctcgcttcatcgacccatttccgggattctctcccgaatgaatgaatgcttgacgggttgccgaaactgccgaagaaatggggcttcatttcttcgagcacacgttcatccatgggggaagtcgcagcatgatctaaataaatccgttccattgtctttacacctctggtttaaatatagaacatataagcttcctgctcgccgtccgtgtagctcgcaaggtcttctaacgtcgtgctgtccagcacgtcttttacagcgtcgcggatgcggatccataactcccgcttggcaggctcttcatcctcaagcacttctaccgggctgatcggcccttccagcactctgataatatctccggccgttatctcttcaggctggcccccgagcacgtaacccccgtaagcgcctctgatgctttttacgagtccggcgtttctgagcggtgatacaagctgttccaagtaatgctcagaaaggctgtttgtttgggcgatgcttttgagcgacgtcggaccgtctccgtgctttttcgccaattcaatcataatggtgagcccgtatcttccctttgtcgatattttcaatatgaacaccccagtcaattctaattgttaatttatacaagtaaatggatatgaataatctgtttagtatcttatagaccaactgttattataacataacttatcctaattttcattgaaacacggggcccgccgcaattcgcttttctaatcgtccgttttccgttaccctgtatatgtaaggagagatgttcatgaaaccattggcgtatcggatgcggcctgccaatatcgaagacattatcggtcaggaacatttggtcaaagaagataaaatcatcggcagaatggtgcgtgcgaagcacttatcatccatgatcctgtacggaccgccgggcatcggaaaaacgtccatcgccacagcgatcgcaggatcgacaagcatcgcattcaggaaattgaatgccgtcattcataataaaaaagacatggagattgtcgtacaggaagcgaaaatgtcaggccaggtcattttaatccttgatgaagtgcacagacttgataagggaaagcaggattttctgctgccctatttagaaaacggcatgattattttaatcggcgcgacgaccgccaacccttatcatgccattaacccggccatcagaagccggacccagatatttgagcttgaaccgttaacacccgatctgatcaggcaggcattgaaaagagcgctcacagatgaacaccggggactcggttcctacagcgtttcggtggacgacgacgcgatggatcatttcgcacaagggtgcggaggagacgtccgctccgctttgaacgcactggagcttgccgtgctctccacaaaggaatcaagcgacgggacgatccggattacacgggaaacggcggaagaatgtctgcagaaaaaaagctatacccatgataaaaacggcgatgcgcattatgacgtcttatccgcgttccaaaaatcgatccggggctcggacgcaaacgccgcccttcattatctggcccgtctgatcgaagccggagaccttgaaagcatatcaagaaggcttctcgtgatcgcctatgaagatatcggcctcgcaagcccgcaggcaggcccccgggtgctgagcgcgattcagaccgcagaacggatcggctttccggaagcgagaattccgctggccaatgcggtaatcgaattatgcctctcaccgaaatcaaactccgccatttcagccgttgatgaggcgctcaaagacatcaggacgggtaaaatcggcgatgtgccgaaacatttaaaagacgcccactataaaggggcccaagagctcggacgcgggatcggctatcaatatccccacgatttcgagaacggatgggtcgaacagcaatatttgcccgatccgttaaaaaacaagcaatactataaaccgaaacaaacggggaaatttgaagccgccataaagcaagtgtatgaaaaactgatgaagcagaaaaaataaccggacaagatctttcgtgtaaacggcggattcaaataaaaaaacagcctttcctgaagaaggctgtttttctttttacttatctttaacccgtttaatgtcgatgtcctttaagagctccatgacaacatgtccgcccataatcagaccggccactgacggaacccaggcgttggaagacggcggcatttgcgctttgcggattttcgcttcatcattcccgacttcttttctgacgtcttcacggatgacgatcgggctttcatcagaaaaaatgacctgtacgccttttttaatgccctctttacgaagccttgtgcggacgactttggcaatcggatcagtatgggtttttgaaatatcagcaatctgaaagcgtgtcgggtctgttttattcgctgctcccatgcttgaaatcagcggaacattccgtttcagacattctttcatcagatgaattttataatgaatcgtatccgacgcgtcaatgacgtaatcgagcggatactcaaagaactgctcatacgtctcttctgtataaaacatttttaaggcgacgacgtcacaatccggattaatatcagcgatccgctctttcatcaattctgttttcggctgtcccaccgtcgacaatagcgcatgcagctggcggtttacgtttgtaatgtcaacatcatctttatcgacaagcacgatccgccccactccggacctcgccaatgcttcggctgcgaatgaaccgactccgccgacgccgagaacggccaccgtgctgttttttaacgtgtccagcccttcttttccaatcgctagctcatttctggaaaactgatgtaacaagaacctcactccacattctggttttataaactcggcttgtcaaaaagccgctggttttagcgcacaaaaaataaagtcccaattgtgccgttgcagctttccttcgttttgaacccgctctcagcaggtgggtgcccttttttaaatcttgtaagtcctctttagcgaatgaaaagaggcatgtacgccatttaaaaatgcgggctcccaaatcaaaaaaatgttcggtcaaaactaggtgtacaactaacacatcaggactttatttaacttgtcaaaatcatatcacagcagattttgattttcaagaaacaaactgccgatctttactgtttcacttttcttttgacagaaaggtgaagttcttcaagctgggcgtcgctcacttcgccgggcgcttccgtaagaaggcagcttgcgcttgccgttttcgggaaagcgatcgtatctcttaagttagtgcggcctgcaagaagcataaccaaccggtctaagccgagcgcgattccgccatgcggaggagcgccgtattcaaaggcttcaagaaggtatccgaactcctcctccgcttcttcttttgtaaagccgagaagcccgaacattttttcctgaacgtctttttcaaaaatacggattgagcctccgccgagttcatagccgtttaagacgaggtcgtaagcctgcgctttcatatcttcaggcgccgtttcaatcaggtcaagatcttcacggacaggcattgtaaacggatggtgagccgcatagaaacggccttcttcctcgtcatgctccaataacggccagtccacaacccacaggaagttgaagaggctttcgtcaatcaggccgcgttctttgccgagctttaagcgaagcgcgccgagggattgagccacaacctcaaacttatcagcgccgaacaggagcagatcgccttcagaagcatcaagcgcttcagccagttttgcctgcttctcttcatcaaagaatttcgcaatcgggccttttacgccgtcagcttctactttcacccaagcgagacctttcgcgccgtaatttccggcaaaaacgccgagcgcatcgatatcttttctggaatagtcgccggcagcgcctttgacattgatcgcttttacaacgccgccgtttgccacggctgatgagaacaccttaaattcagtatctctcactatgtctgacacgtccgtcagcagcatgccgaagcgggtatcgggtttgtcggaaccgtagctgttcatcgcttcttcatatgtcattcgcggaagcggaagcgatacttcaacgccttttgtttcgagcatgactttcgccatcatctcttccgccagagccatgatgtcctcttgactcataaaggacatttcaatatcaatctgcgtaaattccggctggcggtcggcacgcaagtcttcatcgcggaagcagcgggccacttgataataccgttcaaagcccgacaccatcagaagctgtttaaaaatctgcggcgattgcggaagggcgtaaaattccccttcatgcacccggctcggcactaagtaatcacgggcgccttcgggagaactttttgttaaaatcggtgtttcaatatcaagaaatccgttttcatccaagaaatggcggatggattttgtgacttgatgccgcatttgcaatgtttgaaacatcgccgggcggcgcaaatccaaatagcggtgttttaaccggacgtcttcagaaacgtcagccgcctggtcactgatcggaaacggaggcgttttcgccgtactgagcaccgtcaccgcttcagctttgatttcaattttaccggttttcaggttgggattcaccgtgccttcttcacgggcagaaaccgtgccttcgatatcaagcacatattcgtttctgattgcttccgctgcggcaagggcttccttcgatacgtcagggttgaacacgacttgcacaatacccgagcggtcacgcaaatcaatgaaaatcaagccgccgagatcgcgccgcttctgcacccaccctttcagtttgacggtttcgccaatcgctttttcagttatctcgccacaataatatgttcttccaaacatagcgttcctctccttcactgcttttgatctgcctttaacacttgtatcagctcgtctaacaccacttcacgctgctctcctgtttccgcatcttttacattgattttattttgggcaagctcatcttcccctaaaatcgcaataaaacgtgcgccgagacggtcagccgttttgaattggcccttcatctttttattttcataatcgatttcacttgagatgcccgcttctctcagtttgtacacgagggaaacggaataatccttcgctttttctccgagcgtcacgatgtagcagtcgatcccctgattgacgggaaggtctgttttctcagcgtcaatggctgccagcagtcgttcgatgctcatcgcaaatccgatacccggcgcttcaggtccgccgatctgttcaacaagcccgtcatagcggcccccgccggcaagggttgtaatcgctccgaatccttcggcattgctcataatttcaaaagcggtatggttataataatcaagccctctgacaaggttcggatctatttcgaacgggatgccgagaccgtttaagtattgttttactttctcaaaataagcggctgattcttcatttaagtaatcaagaatggacggagccgttttcatcagttcatgctctctgtctttcttgcagtcaagaattctgagcgggtttgtgtgcagacgcgactggcagtctgagcaaaattctccgatgcgcggttcaaaatgtttgacgagcgcttcccggtaggatttgcggctctcctggtcaccaaggctgttcagcacaagcttgacatgtttcaaaccggctttacggtaaatactcatcgcaagcgcaatgacttctgcatccacggccggatctttggagccgatcgcttcaattccgaattgataaaattggcggaaacgccctgtctgcggacgttcgtaacggaacatcggtccgacataataaagcttcgtcggctgcaccgggttcgcaaataatttattttcattgaacgcgcggactgcggcggctgttccttccggccgaagcgtcaagcttctccctttgcggtcttcaaacgtgtacatttctttctgcacgatatctgtagactcaccgacgcctcttgcgaataattccgtatgttcgaagatcggcgtgcggatttctttatattgataagtgcggcacgtctccctcataatttgttcgacgaactgccatctgtctgattcacccggcagtatgtcctgtgtgcctcttggaatgtgatatgccatgttacaggcctccttaatgtctttcttcaaataaaaaaactcccgctcctactatacatgtatagtagggacgagagttatacccgtggtgccaccctagttggaatgccgaagcatccccgctctgacctttaacgcaggttcacgtccgctgcctaatgacttgcaaaagcgttcagcagggaacctccggagtgttgtttcgagaaagatgcagtgcggatccgctttcagcccgggacggttcctctcttttccatgcattctgacctactcttctccattatcggttcaaaatcgttatcatgagttatgtacatcaatttctattataataatgggattgcactcccctgtcaagttttattccgtctgtttttccttgcgaccgcttctttcgataagagaccgaactccgtcgccgtctcttcaagaaaacccgccttttctctatcgctctgatcactgaagtgcagatttccttccgcatcgtgcagcgcgcgtcccatttttggttgatatttcatgatttgcacaccttttcgctgtatttatgactagtataaacaaaccattttatttttatttaacattcagcaaggaaaatacgatattatacaagaatgtattttagttagttcagaaaggaggacagccatgaagaagagaactcttgctcttattttatgcggcgtcatcatcacagcgcttcttccgtcatttcacaccgcaatcgccgcagagggagaagcggtcatcgcgacagacaagatcaatgtcagaggcggtcccggcctgagctacggaataaaggctgaagtaaaaaaaggggaaagatacccgatcgttaaagaagagggagactgggtacagcttcagctgagccccggtaaaaccggatgggtcgtttcctggctgatatcaaaaacagccgggggagcagacaattcatccgcaaaaagcggaacggtcacttccaccgatcctgacctccgcatcagaaaaggcccggggacatcgtatgaagtcatcggcaaacttccgcaaggcgcgcatgcatccgtgctggacaagaacagcggatgggtgaacatttcttatcaaggcacaaccgggtgggtttcttccgaatacgtcaccgcggacagcggcggatcggatacgaaagcaacttcggcccgaagcgggtcaaaaagcgggacggtcggcgtttcttcattgaatgtcagaagtgcagcgtcacatgattcagcgattatgactaaattatcacgcggaacaaaggtttccatcttaagtgaagaccacggctggctgaaaattgaagcaaacgggcaaaaaggctgggcagcaagccactacatcataaaggattctgactcatcgggcagcgcatccggctcgggagacggttctgcgggctcaggctcctcgaaaaaagcgtatattgtttacggcggcaccaacttaaggagctcggcctcgacttccgcttctatcgtaaaaagggcagataaaggcgcagcctacccgattgtcggctcaagcggcaaatggtatgaagtccggcttgaaaacggacaaaccgcatatgtggcagactgggtcgtacaaacgtcaaaaagcggtgaggaaacaggcgaagcaccttctcccaacacgtcaggcggcagcggctcacttaaaaacaaaacgatcgtcgttgatcccggacacggaggaaaagacagcggaacgatcggctactccggaaagtttgaaaaaaacgtaacgattaaaacagctaagctgttagccggaaaattgagagcggccggtgcaaacgtgtatatcaccagacaggatgatacatttatcagcctgcaggccagggtttcaacctctcattaccggaatgcggatgcctttatcagcattcactatgacagttatgccgatacgtcaacgcggggaagcacggcttattattacagtccgtctaaggaccgccagcttgcctcagacgtccattctgaagtagtgaagcgttcccctattcctgatcgcggcgttctgtttggcgattattacgtcctgagggaaaataaacggcctgccatgctgtatgagctcggctatctcagtcaaccgcaagaagaaacaatcatacatagcggctcttatcaggaaaaagtgacagacggaattgaaagcggattggaacattattttcaatcataaaaaaaaagctgccgaacggcagcttttttattgtttagaatccataatcaatgtaatcggcccggaattcgtcagctgaacatccatcatggctccgaatattccggtttccactttgactcctttttcccgaaggagttcgttccacttttcataaaggagcacagcctgatccggtttagccgcattcataaaattcgggcgtctccctttctttgtttcgccgtaaagcgtaaactgggaaacggataaaatctccccgcccgtatccaaaagcgataaattcatcttgccgctttcatcatcaaatatccgaagattcacgattttatccgccaagtaagcggcatcttcttctgtatcttcatgagtgatgccgacaagcgccataataccgggtccgatccggccggcgacagcgccgtcaaccgtcacactcgcttctgttacacgctgaacaactaatttcatagcaagctccttttagttcattacccgccggactgaatagatgtctctgatctgcttaatccgctcgaccactttgtgcagatggttaatgttttgaataaaaatcgccatatgaatcgtagcgactttattgcggtcggatttgccggagacagaggagatgttggttttcgtttcatttacggcttggagcacctcatttaaaagcccgagacggtcataccccaaaatctcaatctcaacgttatattctttgcgtctttgaacctgtgattcatgctcccattcaacgggaatcagacgttcctgcgcttcattcgttttgacgttcggacagtcgtcccggtgaacggatacaccgcgcccttttgtaataaaaccgacgatatggtcgcccggcaccgggttgcagcatttcgacaagcggacgagaaggttgtcaatgccttttacgcgcacacccgcttcccgttttctcccttgaggataatgtttcggctcggaagtgacttcctgaacgattttttcctgctcttcctggtcacgcagcttccgttctttttcggtgagcctgttggccacctgaagagcggtaatgccgttatatccgaccgccgcgtacatatcctcttcatttgagaaattgaacttgtcggcaactttttgaagattttcgagcgttaaaacatctttcacttcaaaatcaagatttttaatttctttctcgacaagctcacggcctttttcgacattttcttcacggcgctgtttcttaaagaattggcgtattttgtgtttcgcctgggacgtctgcgccagtttgacccagtcttggctcggaccgtaagaatgcttggacgtcagaatctcgacgatgtcgcccgtccggagcttatggtcaagcgtcaccatttttccgttcactttcgccccgattgttttgttgccgatctctgagtggatcctgtaggaaaaatcaatcggcacagagcctgacggcagttcaatgacatcgccttttggcgtaaatacgtataccatgtcagaaaacagatcgattttcagcgattccataaattcttccgcatccgtagactcgttttggaattccagaatttcacggaaccaggacagttttttctcaaatgtcgcttcttcgtttgcagccttgccttctttataagcccagtgtgcggccaccccgtattcagcgatctcatgcatctcaaacgttctgatctgcacttccagcggatcgcctttaggcccgattacggtcgtatgcagagactgatacatattcggcttaggcatcgcaatataatctttgaatctgccaggcatcggcttccagcacgtatgaataatgccgagtacggcgtagcagtctttaatgcttccgacaagaatacggacggcgagcagatcatatatttcattgaactgtttattttgcagcgccatcttgcggtaaatgctgtagatgtgcttcggacgtcctgaaaagtccgctttaatattcacttcttcaacgcgttttttcacttcattgacaacctcttcgacataaagttcgcgttccgcgcgctttttcttcatgaggttgacgattctgtaatattgctgaggattcaaataacggagagcggtgtcttccagctcccatttgatcttagaaatcccgagccgatgggccagcggagcgaaaatctccaacgtctcatttgaaattctccgctgcttttcctgcggaagatgctttaacgtccgcatattgtgaaggcgatccgccagcttgatcaatatgactctgatatcctgagccatagcgacaaacatttttcgatggttttccgcctgctgctcctcttgagatttatacttaattttaccgagcttcgtcacgccgtcgacaagcatcgccacttcttcagaaaatacttccttcaggtcgtcgagggtgacatccgtgtcctccaccacatcatgcagaaatccgcccgcaattgtggaagggtccatttccaaatcgacgaggatccccgccacctgaatcggatgaatgatgtacggctcacctgatttgcggtactgttcgcgatgcgcgttttgcgcatacaggtaagctttctcaacaaacgcaatctgctcctccggcagataagtgcgcgctttatctattacttgctcggcagtcaatacttgttcgttcgccatggaatcaccttttttaaatgtaaactgtattagtttattatcaagaaaaaaacgagagatgtaaagggcagaagttcaaaacacctaaagaatctgtcaggatgatgaaataataggaaaaaagcaccctgacacgagtgcttttttccatatgcggttaatatttcattaatgttaaaatatcataatcgtcaagcttgtctctgccgtcaaggtaagaaagctcgattaagaacgcaataccggctacgacgccgcccagttcttcgactagcttaatcgttgcttcgatcgtgccgcctgttgcaagcaagtcatcagtaatcagcacacgctgtcccggcaggatcgcatctttatgaatcgtcagtacgtcttttccgtactccaaaccgtaatcgactttaatgacctcacgcggaagttttccttctttccgaaccggcgcaaagccgactccgagtgcgtatgcaaccggacagccgataataaagccgcgcgcttcaggcccgacaactaaatcaatttctttttcttttgcatattcaacaatttggtcagtggcgtaacggtatacgtcgcctttgtccatcaatgtcgtaatatctttaaattgtacgccttctttcgggtaatcgggcacaattgttacgtattttttaagatccatctgttctatgtcctcctcgtactttcataagcctctgaaccttggttcatcagcttattcagccattccttcagctcatgggctgcggaataattgagcttctggtctaattccatcagctgctgttttacctgataggtttgcgaatctgccaggtcgcgttttttcgcaccgctcacgacagacagcacaccatcttctattttaacaaaaccgagatcaaaaaacacctttgtcatgaaattgattgtgtcaattgaccatcctctgtgtctcgcaagctctgaaccatgcttgccgaagtcaaaagcgccccttttcaagagaaatgcgtaaaaccacttgaaatcattccgcgatggaaatgaggacaggaaatgttcttcatgattgataaaaacaaaataaatccgttccggcttctttccgtcaagcaaatgctgcaggcgatccgctgacggcggcacatccagaaaaacggcatattttccgtcaagctggagagcttccgcctcggattccgaagtgatctcggcaagctcgcccgtcagctctttttcacggagcttctgagcggttttttcgttaaagctgatgagcacccgtttttccttcggcagtgcggtgaccgtatcttcccacgtccgcttgcctcgaatatcaaaaagctgccattccggcaccgcagcatctttaatcatcagctggggcttctttctgttgttccattcattaatggacatctcgccgacaatggaaatcgttgatccgggaacaactccggcttccagctctcctttgttaaagccgacgcagtcaaggacggcggaatcacttttcaccgtcattttcacgtggtttttattcgctccgatcaggcgcacatcatcaagcacggcatttttcaccatcacatgcggtttagggttaagcatgccgaacggcgacagcatattcaattctgtaatgctttcaacggttatgtcttcaacgccgcagacaagatcaacctcctgaacgggaataaaatcctcttccgtaagggtttcttcagccatttgattcagcctgtcccttaattccgccacatcttcagccttcagcgtcattccggccgccatcggatgcccgccgaaatgaggaagaatgtctctgcactgtgaaaggctcgtaaaaaggttgaagcctctgatgcttcgcgccgaccctttggcgattccctgctcctcatctatcccaagcacaacagcgggccggtaaaaacgttcagccagcttcgatgcgacaataccgacgacacccggattccagccggcttttgccactacaatggcagacgggtttccgccttgctgctgtaccatttcaacagcctcttcggtcatggttttcaccattttctgccgctctttattcagccggtcaatatccgaagccagttcctccgcttcaaactgatcttcggtcatcagcaggtgcacagcgggatcggcctgttctattcttccgacggcattaagcctcggtgcgacctgaaatccgatcgtttcctcatcagcttgtccgatatctccgccggaaagcttaatcagagctttgaggcccggccgatttgtcgtacgaagcctttcaattccgagtgacgcaattaatctgttttcatcatgaagaggcaccagatctgcaaccgtaccgattgccgccaagtccagcatagcttccggcaaagaacccgtaagcgcgtgggcaagcttaaacgccacaccgacgccggccaattctttaaacggatagccgcatcccggctgcttcgggtggatgatcgcaaatacgtcaggaagctcgggtcccggctcatggtggtcggtaataatgacgtctaagcccagctcttttgcgacttcagcttcatggacggcggcgattcccgtatccactgtaatgatcagcgaaaatccccgctcttttatggaacggaaagcttgttcattcgggccgtagccttctgtaaaacggtcgggaatataaaagtcaacgtccgccgacagctgtctgagtgccgtcagcatcactgacgtgcttgtaacgccgtctgcatcgtaatctccgtaaatcataatcggttccccttgagaaaccgccagttttatccgatcaactgcttcccgcattccctttaattcatacgggtcataaaagtctgcatcctttgtatgtaaaaacagccttgcgctttcggcagtatcaaaacctctttttacaagcagtgatgccacaagaggtgttatgtccaattgttctgtgagtgatttgactttttcctgatccggctgctggatttcccagcgcatttttgacgctaacataaattcacccctcaaccaccctattatactagagcggactgaggggtttcaaatgttattctgatccttttttctcttcaagcatttcttccggcggcgcggctgtttttttgccgtccgaatcagccgtcaattcacctgcggatctgttttctttccgcagcattttaatttcgcgcttcagtttcatcacttgaaatataccggctgaaaacacgatcagcgctcccattaacacagagcctaaaatgactaaaatcagcggccattcagcggttccgaacagataatcaacctcaaccgcccgcacgttaatgacagcaaagatggcgacaatcagagtaaatagtaaagcgaatataatagtccattgtttattcatgcgtctgcccccaattattgattcttatcttttcccccattttcccgggagtaaaccccggtctcaggaaatccgggccgttaattgctcgcggaccagctttttcagtccgcttctttctcccgatataacgagggtgtccccttcttcaattacggtatcaatgccggggctcagctgtttttgccggtttttcttcacgatcgcaataatctggacgttgtaatgtttcttgatctccaaatctccgattgtgcggctgacagccggtgcatgagattcggctttaaaccactcaatgacgaggtcatcaagcgcgacttccacagattccagcgctttcggcttatacgtcatcccgcctaaaatagcggaaatctgcctcgcctcttcgtcgttaaattcaacggatgccaagcattcgtcataatcattctcatcgaagtaatagagctcttttctgccgtcatcatgaagaataatactgattttatcgtgatttttcgtaatgacttctactttctggccgatgcccggaagctccgactcacgaacgttcataagaaccccctacatgttttaacaatgatgattgattatgtaagcgtatgtcattatagcaaatgcaggttttaagttcaatgcggcctaaaaaaaacaggctgccttccggaagacagcctgtttccttttactcttcgattgattttttccctttaaattcttttcctttccatacaagccacagctgcgcggcgatgtaaagagaggaataaacgcccgtcaataaaccgaccaataaagcgacggagaagtttgtaattgacgatgagcccaaaatgagcagcacgacgaccacaatcacaacggtcaagaccgtattgatcgaacgtgtaaaggtttgctgcaaactcagattcacgatatgttccagatcggcaaatgacttcggcttgcgttttttcatctgctcgcgtatccggtcaaatgtaacgatcgtatcatttatcgagtaaccgattatggtgagaatagcggcgataaaggttacgtcaacctccagccttgtaatgctgaaaaacgcgacgataaagaaagcgtcatacagcagggatacaatcgcggcgattgccattctgtactcgaaacggattgacacgtaaataatgatgccgattgatgcaattgccacggcatataaagcattacgggccagttcttttccgactgtcggcgataccgtgctgacgttcggttcagatccgtatttgtccttaaagtacgttttgatttcagcgattttttctttggatggctctccgacaaaccgggccgcggcaacatggttctctttacccgagagtacgatgttttccggatccatgccgagagagtcaaagtctttttcaacctgctgcgccgtcaatgcatgattgctctgcacgtcaatccgcgcaccgcttgcaaaatcgattcccaggttgagtttaaagaccagtaagatgataattcccgcaatggttacagcgcttgagaaaataaagaaatattttcgtttgctcgtgaaatcccatttctggaatgccgtatgcggttcagtattttcatctgttttttgaatgtccataatatgttttttcttgacgccgaaccagctttttttccggtcaagccatctgctttccacaagaagggcgagcaggaatcttgaaaggaagacagctgtaataaagcttgtcagtattgacaaaatcagcatcgtcgcaaacccttttacagagcttgtcccgaaaataaagagcacgaccgctgcgatgatcgttgtgatgttcgcatcaaagatcgtcgcaaatgaccgtctgttccctgaacggaaagctgagcggacggatttgccgagtttcagttcttcttttatccgttcataggtgatgatgttggcgtcaaccgccatcccgacacccaaaatgagcgccgcaatacccggaagcgtcagcaccgcctgcatccagtcaaacacttgaagcgtaatatacacgtatacagaaagcgtaatgaccgctatgagtccaggcagtctgtaataaagcagcataaataagaaaacaattgcaataccgatgatgccggcctctaccgtatcatgcaaagcctgctgtccgaattgcgcccctactgaagtagagtatttttcggtcagtttcacaggcagcgcacccgcgtttaaaatattggccaagtccttcgctttttgaacggtgaactgaccttcaatcgtgacatccttcgtgtttaattcctggctcacattcggagcggatacatatttcggatgttttttgccgacttcttttttaaatgaatcgcccttttggtaatcaagccagatcacaagctgattattaggggccattttcttgacttttttcgtcacttctccgaacttatccgcatccttcagcttaacgctgacaatcggttcgttcgtcgtcggatcaaaggtttgcttcgcgccgttttccacgagatcagagccgtttaacagctctttatcattcgtatccctgaacgagagctgcgcttccgttgacagaatttcgcgcgccctgttctgattcgtgacgcccgccagctgaacgcgtatgcggttatttccttcaatctgaatgttcggctcgcttacgccgagaacgttagcccggcggttcagcgcctgcaccgtgctgacgagcacgtcttttgtgattttatcgccttttttgacgggctgcacatcgtacagaacttcaaacccgccgcgtaaatccaatcctaacgtaatattattggcagccggttttgtaaaataccccagccctgtgccgatcaataatacgatcaggaaaaacgcaatcaagcgtccttttttcattatgtatttcctccttaaacctatgccgtcaaatcattatctcagcagttcatccaaagcttcctgaccctcatcgctttccagccaattagacgacttaaaagcttcaacggttgcatagttcataaaatcgccaattttaactgataaaatattaccggccaattcatgcagcggcaattcctttttctgtttccactttttatgtattaagtatgaccataaactctcgtgctcaacatcatcgtatccaaggattttgaactcttcaagtttactgtacaagaaaggccgcaaatgatctttgtacatttcggcgggatgtttctccactgggcgctcgctcctttttccatttttctcgaagacttgtcatgctcggacgacatcggcgcatatctttattgtatatgattccaggtagtttgagaaggcaggggtttataaaatggcaaaacagacttttttaaggggcactcttattctcattgcagccgggatgattacgagaatgctcggctttgtcaaccgggtggttatcgcccggtttatcggtgaagaaggggtcggtttatacatgatggctgccccgacatttttcttggccaccactttgactcaattcggcctccccgttgccatcagcaaacttgtcgctgaagcaagcgcgcggggggaccggcagaaaatgaaacacattttagtgatggcgcttaccgtcaccgggatattaagtctcatcttcacgccgctgtttttatgctttgcgccgattatgtcagaaacgatgctgacggatcagcgcacggttttcccgcttctggcgattacgcccgtcgtgccgattatcgcgatatccagcgtgctgcgcggttactttcagggcaggcagaatatgaacccgctggcgttttcccaagtgcttgagcagatcgtgcggatttcacttgtcgcagtctgcacgacggtgtttctgccgtacgggattgaatatgccgcagcaggagccatgatttcgtctgtcatcggggagcttgcctctcttatttatttattcatttgttttaaagcaaataaaacaatcagaatcagaaaacaatttttcaagtcgattgcaaatggaaaagaaaccttccgccagctgatgagcgtgtcgctcccgacaaccggaagccgcttcatcggaaatttatcttggttttttgaacctattgtcgtcgcgcagagccttgcgattgcaggagtggccaccgctgccgccaccagccagtacggggagctgaccggatttgccatgacggttttgacgctgcccagctttataacctattctctgtcaacggcgcttgttcctgcgatcagtgaaggaatggagcaaaaaaagctgcaagttgtagaataccgtctggaacaggcgatgaggctgtgtcttttaagcggaggcatttcggtggttattttattctctttcgctgatgaactgatgtccgtcatgtacggatcaactaatgcggcggtatttgttaaagtgatggcgccgttttttctgctttactattttcaggggcctcttcaggcggtgctgcaggctctcaatttagccggggccgccatgatgaacagttttatcggcgccgctgtcaaaaccggcctaatttttgttttggcgaccaggccttccttaggcatcatgggcgccgcacttgcgattgtaacggggatggtccttgtcaccctgctgcatgcggccaccgtaagcaaggtgcttccgatcagcattaaaataaaagaatacgcgctctgttttgccgtcatattcatttgcggttatgtcagccgcatcatcaagcacaccgttcatttttcaggatcagaggctgttaatctcacaggctggattgcaatgaccgcgattttgtacattgcgctgctgctgttattcaggctgattaaaagggaagagctgatccggattccggtcatcggcaagttcgtgacgcggtgaagccgatttatggctcccctttttcatctttgagatcaataaaaaaagcgccgtccgtaaacgtgcagaatgatataaccgaaagatcgcgatatcctctttttgctaaatttttttcaagccagtgtttatctttcccgattctgtccagatgctcgttctgaatgaccccgtcaacgataagcgatgtttccatctgcttatccttattgtttttctttttgacgattgacagtttgcccgaagactccaaaatggcatacgatacgtcagagattctatcgatgttattctccctcagctgcataagaagatcgtcaaaattgtagcgctgcgatctcatcgcccgttcatcaatttttccctgttttataataatggtgggttttccgtcaagcagctgccgtattttttggcttttgagcgaaataaaagcaaggcttacttgaataatcattaaaacgacaatcggcacaattgtatgcaaaagcttatcttttacattttcaattgccaatacggcaatctcggcaatcataatggagacgacaaggtctaaaatgctcagttctccgatttcccgttttcccatcagtctgaaaatcacaagaatgataaaataaagcacaatcgtacgaaacgtaataatgaaaatatcttccatatcgcacctccaacggtcatagcatttgccatcggctctgaattatgtaagaaacgggctgaacatcatgcatttacgtctaattcgaacattcagagaatacatttagaaaaagacgggctccggcttgtcatatatcaggccgcagagcggagaggagataaaaatggaagaaacgaaacaagtgggaagaggcgttttgtacggcttagtggctatttttgcggtgatgcttcttacgagtttggcgatttcgcttttactgacagtcacctcaatggaagaatcatctttcagctggctgatcaccgcgctttcttttctttctttatttgcgggaggttttatatcgggcggcaaagcgaaggaaaaaggctggatgatcggagcgttaaccgccgtctgtttttcattaatcatcttgctttttcaatatttagggttcggaaaaacgtttacatccggtcagcttttgtttcatctcggctttttgggagtcagtatgctgggcggcattttcggagtgaatttgaaaggaagcagatcagcgtaataaaaaaagagcggattctccgctctttttttgtatgtatgagcttcgctgttattcagcggaagcttctctgattgcgcggcggtcaaatgttaaacgggtgttatcacctgttttaatgacgaccttgctttcatcaattgaatcaacagtgccgtgcaatcctccgattgtcaccactgaatccccttttttcagctcttcctgcatctggcggacggccttctgctgcttttgctgcggacggatgagcaggaaataaagcactgcaaacattaaaataataggaacgattgtgcctaaagtacccatctgtttccctcctttcatgaatggttttatttagaagcttttcgcatttggcttattatagccgtaacgctcaaagaactcttctcggaaatcaccaagacgatcctcccggatggcttgtctgacctgctccattaagtgtaacagaaaatgaaggttatggtaagttgttaatcgaattccaaacgtttcattacagcggatcaaatgtctgatgtaagcgcgggagtaattttggcatgtatggcagctgcactcttcgtcaatcggacggaaatcacgctcatatttggcgtttttcatattcagacgcccttcattcgtaaacaccgtgccgtttcgggcaatccgggtcggcagtacgcagtcaaacatatccacgccgcggatggcgccgtcaattaaggcatccggtgaacccacacccattaaatatctcggcttgtccttcggtaaaagcggggttgtaaactcaagcactcggttcatgacgtgcttcggctcgccgacagataatccgcctatggcataccccggaaaatcaagcgaaaccaagtcttttgcactttgtgtccgcaggtcttcgtattctccgccctgtacgattccgaacagcccctgctcatctgagcgcccgtgcgcctccaggcagcgttccgcccagcggctggtccgttccacagagcgtttcatgtaatcatactctgccggatacggcggacactcatcaaacgccatcatgatatcagagccgagggcgttttgaatttccatcgctttttccggagataaaaacagcttgtctccgtttaagtgattgcggaaatgaacgccttcttcttctatattacgaaacttgctcaatgaaaagacctgaaaaccgccggaatctgttaaaatcgcgcggtcccagttcataaacttatgaagcccgcccgcttcttttacaatgtcgtgtcccgggcggagccataaatggtacgtattgcttaaaataatgcccgcatccatagatttcagctcatccggagacatcgtctttaccgtagcaagcgtgccgaccggcataaatacaggcgtctcaaaggagccgtggggcgtatgaactctgcccagccgcgctcccgtttgtttgcattcctttataaattcataacgtatcggttgttcagccactttgtatgaggcctcctgtcttcaaattagataatcagcatggcgtcgccaaagctgaagaaacggtattcctcttctaccgcatgacggtaggcggaaagaacatgctctctgccggcaagcgcagaaacgagcatgataagggaagatttcggcagatgaaaattggtgatcatgccgtcaatcgctataaattcatatcccggataaatgaatatggacgtccagccgcttgaagcggtaaatacgccgtcatgctcgccggcaatggtttccagggtgcgcgttgatgtcgtcccgaccgacacgatgcgccctcccgcctttctgacctcgtttaaagaggcggcggtttcttccgtcatttcataaaattccgcgtgcatgttatgctcttccacatcatccgcactgaccgggcggaatgtgccgagtcccacatgaagtgtgataaattcaatccgcacacccttttgcttcagctcgtccagaatctcttccgtaaaatgaagtccggccgtcggagctgcggcagatccgatttcttttgaaaagacggtctgataccgttctttatcatcaagctgctctttaatataaggaggcagcggcatttcaccgagtgattcaagcacttcgtaaaaaatcccgtcataccggaattctatttttctgcctccgtgatcaagctcctccgtgcagaccgctgtcagccggccgtcgccaaatgtcaggaccgttcctttttttacgcgtttcgccggctttacgagcgtttcccatgtatcattttcttcctgttttaataacagaagctccactttcgctcccgtatcttcttttgtgccgaataatcttgcaggcagcacacgggtattgttcaagacgagacaatccccttcattaaaaaagcttacaatctctttaaatgaactgtccgtcagcccgcccgtctgtttgtcgagcaccatcagccgcgatgcgtcacgttctttcagcggcacttgggcaatgaggcgttcaggcagttcaaaatcaaataaatcgactttcatcatttcacctttattctgtctattgttatttcattctgccgaaaaaattaagcagaatggatagtatcacactgatcacaatacaagtgacaacgggaaagaaaaatgtaacatttcccttcttaacgaaaatatctccgggcagccttccgacaaagtgccagactgcgccggcaataagcaaaacggcaccgagaaccatgagaaccttcggaaagtcagtcacgggcgggcgcctccaatcgaaaatgttcatacacagccggagtcacgacccgtcccctcggcgtcctctggagaaatccgatctgcagcagatacggttcgtacacatcctctattgtatgcggttcttcgccgattgtcgcggaaatcgtatcaaggccgacgggacctccgctgaatttttcgatcatgcccatcagcagcttatggtcgatatggtcaaggccgagcgcatcgacttgaagacgttcgagcgcgtcgtgagcgatttcttccgtgatgcggctgtcgccgagcacctgggcaaaatctctcacccttctgagaagccggtttgcaacccgcggcgttccccttgaccgtctggcgatctccagagccggagcttcttcgatatccacttcaaaaacgtcagccgttcttgacacgatatctgtcagctcttcctgcgtatagtattcaagacgcgacagcaccccgaaccggtctctgagcggtgcggtcaataatccgacccttgtcgtcgctcctacaagcgtaaaagggggaaggtcgagacggacggagcgggcggacgggccttttccaatgacgatatcaaggcagaaatcctccatcgccgggtacagcacttcctcaatcgagcggttcagcctgtgaatttcgtctataaacagcacatcccctggttcgagcgccgtcaagatggctgccaaatctcccggtctttcgatggcgggacctgacgtcgtccgcatctccacccccatctcattggccacgatagacgcaagcgttgttttcccgagacccggaggcccgtataaaagaacgtggtccagcgtttcctgcctcattttcgccgcatcgataaacacgcgcagattttctttcaccttcttttggccgatatactgggcgagattctgcggcctgaggctttgctcgattattgattcatggctgtctgcttcacttgaaacgagccgttcatccatgaacatcaccttactttaataatttttgcaatgcttttttcacatattgatctgttgaaagcgccgtttcctcttttaagtgaggaagcacttttttaatttctttttcggcgtagccgagaaccctaagcgcttcaagcgcctcgtcaagcgccgtttcagcctcttgtttttcaatgcgcgcttcatgattgaacaggttgtcaatcatttcaggcacgacgtcggccagtttgcctttcaaatcaagaataatctgccgcgccgtttttttgcccacacccggaaatttcaccaaaaaggcttcatcttcctgttcgatcgcttcgatgacggctccggggtcaccggaaccgaggatggcgagcgcccctttcggcccgatgccggtgacgttcagcagctttgtgaaaagcgctttttcttcccgggttgaaaaaccgtacaaagaaaaggcgtcttcttttatatgatgatacgtaaaaatggtctcttgattgcttaccttataaataaacgggttcggagtgaagacctgatagccgattccgccgttttcaatcacgatgtattggggagatacataatcaatcgtccccttcacgaattcaatcacacctattcacctctttgactgcttatcattgtaacacaaaaacagccaaagtcttatagaaaagttaacgtatgttcgctttgacatcttccattcagaaaaaaaagacatgtgtcacatgtcttgcgtcaaagtcatccgctgtaagtcttaatatgatcgatcacgctctcaaactccgcttttgtcctgtacggtatgccgtgttccaagtgcttttgcaatcggctttccagcctttctatatcaatctggaagaaagattggatcggctcggccagcgatccgggacggccgtgaaaagtggagatgacgcctccgtccgtgacgccgatataaccgttaaccttactgagcggagaaatgtcatcaacatgcttacggaaaagaacgaagccttttttctgctcaacgagcgtccagcccgcatatgcggcccaaaaatcctccatcgccaaaacggtttcatccgtatgttcgatgccgacatcaccgtccagatagaccttttccagctggacgtgcacccgaagcggcccgtaatgctcaacctccgccccgtatgcgccttttcctccgcaaatcaggactgcagccgataagataagcataaacaatagacgagcaccgcaaattcgtttcaccaataacacctctttattcaatcaaactcttgatgctagtttgaccaaagatgccggtgcttaaccgttttctttcatttgtctgtttcagccgaataaaagcagcctctattatgaaggctgccccgatgattatgcccggccggctgaaatcagtttcatttgtccggacgtcagtttgagccggtatccccttacggtcagatacacagttttttctccgcggcttttgtcatgctccgtttttttcattccggcccctccgttacgttttattacttttatgttaacaccgcaacataaagagcgttttaagaatatgtaaagaaatgatgaagctttatccataaaaatactgccggatgaaatcatccggcagtcccgtttaacggctgtttctgttcatgtcttgcagctttgtaaaagtagcgttgtcggtaaacacttgaattgtacggccgtccgcaaatcttttggccgcatgtttgacatgtttatcatcatttttcgtaaaaggatgatttgttctgacagcaatgacgactctcgtgtcagtcacgatgacctgactatcctgtacgccttttacttttttcacgcggtttgcaacttttgccgccagcctgatgttttcggcgttgtcatacccattataagacatagctgccggcggcgtattgacatttcggccgttatatgtgccgtccgtcgttaacggaaccccgtcattaggcgcatactggtcagacacgtttgtcgtattatgacggccgtttcggttttccatcatttcagaaacgggtccttgatggtccattccgtactggcgtctgccgttatcattatcattcgaataatatccgaccggacgtgttgactgattgtagcgtccgtcattcatggcattatttgctccgcatgccgttaagcttgccgtcacggctaaaacgcctgcgatcgtcatcagttttttacccaatggaaaaaccccccgtggattcatcgctgtttgagcgttttccgctcatgtttaggatgtgcggccgacggcgggtttaagcttgtcagttatgtccattcctcagttggacataaaaaaaggaacgacatacatcgtcccgaaacattaatcttcttcttcctccggccgtccgaatacttgatttggactcggctgattcggtgcggcattaggatttgctccgccgtaaggcataaaatatccggcgtttgcacccacattcggatacggctgcacaggcatatttgcgtgatggtgatgtgaaccgtggtgatgatggtggtggtgatgtgaatcatggcagccgcaatcatcatccttaaatttcccatcatgatgaggcgcgtttgcgtaatgagacgaatatccgccgtaatacggcatttgaccgtacggagcaccgccgaaaccggatgcagaaccatcataatgctctgcattttcatgggcctggttttcatattcaccgtaacccgcttgcggcccaaatcccggatgatggaatccgtgatgatggaatccgtacggtaacggcatcggcattaccggaaagcctccataacctcctccaaaaccgccgaaacctccgcctaccgggaagcacggatggcatagtcccgaacccggcagcatcggtgtcaccggaaccggacaaggacaaggcatgcacggcatcgggtaatgcataaaaggcggttcaacggccggcatattcggaaacgggacattcggaatgtttggcatgttcggcagatgataagcggcgttttcttcttccatctttccggcttcaggcgccttcggcatattcgggtaattcgcgttttccatgttgatcatttcctcctgttgtggaatgttattgtcatgctctttttctttcggctcgacaaaatgtgtcaccggttcctccggcttaggaggcgaccacggctgaaacagctgattggacggataatattggttcatatcagcttccggcagcacattttcatgcttttcagggattggcggcacatacggaattgacggcttcggttcttccggtatggtgtcttcaatgtccacaactgatttcggtttttctttggcatatggatgctcatgcttatgcgcagacgttccgaagccggccttgggttcttttctgaccggaacggcttctgaaggcacctttatcttcattccaggcataattaagtctggattgctaagctgatgattcagtttttttaactcttcaagatcaactccgtatttttcagctattttccagagcgaatcgcctttttgaacgatatgaattttcaacgttttcccctcctatgcacaaaacgtgaacggtacatttgtcattacaatacgtttcttcacactatatgccggtggactgggcatgatgataaaaaatttgggaaggaggggaaatttttatgattacgtatgactcagcattctgttcaaagcacgaagcgcttctgtccgaaccgcttccggaactttaatgacacccttcggctcgcctttttcaagctgctcaagcgaccacaataaatgcggcaggtcgattctgttcattgtcagacacggacacatatcgggattcaatgattcaatctgtttatccgggtgcgagtgaatgaggcgctgaacaagattcatttccgtgccgatcgcccacttgcttcccggttctgcctgttcaatcgtatcaataatatatttggtagacccgctgtcgtcactgagcgagaccacttcccgcgaacattccggatgaacgataatgcggatgccggaatcccgctgccgcagctgaaaaatattttccgctgtaaacttttcgtgtacggagcaatgtcctttccaaaggatgactttaatgttttccggatggtcagtaagcaatcggttctgccccgggtcccatacagccatttctgtcagcggaatgccgaggtcataggctgtatttctgcctaaatgctgatccggcaaaaataaaattctttctttttgtttaaaagcccatttcagcacactccgggcattcgaagaggtgacggtcgctccaccgtgccgaccgacgaatgctttaatttccgccgtcgagttaacatatgttaacggaatgatggtgttaccgtacagttcttgaagctcttgccatgctttgtccgtctgctgaatatctgccatatcagccatcgagcatccggcgcgcatgtcgggcaatatgacggtttggttatcatcagtcagcatatcagcggtttccgccataaaatgcacgccgcaaaacacaatatattccgcctctttatttttttctgccacttgagcaagctgcagggagtcacctgccgtatcggcgaattgtatcacttcgtctttttgatagtgatgccccggaatgaacaggcgctttccgaaatcccgtttaatggcggcgacacgcttttccatttctccggtgctcatgtctttataatggctcggcatcatttcggctgatgcagttaacacgtcaaaaatagacatcttaaaaatccccctgttccgcagcctcaacatccatgctgatgtcggcgctttttactgaatgagtcagaaatccgagtgaaatatattggacgcccgtccctttataagcgggcaatgtgtcgagcgttatgcctccggatgcttccgttttgatatggcccggtgtcatgcctgcaaaacgccggacggactcaggcggacagttgtcaaacataataatgtctgcgcccgcttctattgcctcgagcagctgctgttcggattcgatctcgacttccaccgcaagcatctgccctgccgtttctcttgcccgctccacggccgcctttatcgatccgcaggcggcaatatgattatctttaatcatgatgccgtcatataagccgaagcgatgattaaagccgcctccgacccgaacggcgtatttttccagcattctgagccccggtgtcgtttttctcgtatcacaaagcttaatggacggatcatcaagacgccttttagcctcgtccgtcattgtcgcaatgcctgacattctttgtatgagattcagaatgacccgctccccagtaagaagagctgccgcccggccttccatttcagcgagcacatctccttttttcatccgttctccgtcttttttcagagggcggatgcggatatcatcgtgtaaaagcttccatccttcacggataacgtcttctccggcaaacacgccgtctgtttttgcgatgatccgcgctttacattgctgatcagaaaaaatcgcttgtgacgtcgcatcacccgttccgatatcttcctgaaaaaaatgagtcagcatttgtttcagctgcagaatgtccatagttccccaatcctttcgttttttctgataaccgttccagatgttgaatgaatgatttgttttccgtgccaatctttctccgtcccgggaaaatcagtacgaaaatgagcgcctctgctttcttcccgaataagggctgaggtgacaacaagttgcgcagtcttccataggcaggatagctctgcttgttccattgtgatatccttcacatttatatgatgcacagatacgttgttaagccaggatgtcagcgcctgcaggttttctttttccctgacgatacccgctccggttgtcattttggcttgaagcacatgaatcgttgtgtccggcacttgtaagatgacatcagttttcttcggggtttttttatatcttccgtttaacggtgtttgaatgatatgttcagcacatcgttgcccgcttgccagcgcttccagcagtgagttgctcgcaaggcggttcgccccgtgcaagcctgtgcaggcggtctcgcctatggcgtacaaatcaggcacggacgttttcccccatgtatcggcttttactccgcccattaaaaaatgcattccgggtgctatggggatcccgctttcaagatcaacgccggctgtttgacaaatttctgttatggtcggaaaacgtttgttaaaatcggctattcggctgcaatttataaaaacaggattttctttcatcatttcttcataaatcgcccgtgaaaccacatcccggggcgccaaatcctcaagcgcgtgtctgccagccatgatcctgcgcccgaagcgatctgctaaatatccgccttctcctctcactgcttcagaaatcagaccgtaaacagtcccgtttttcacaaggagggtcgggtggaactgggtgaactccatatccgtgatctcagctcccgcgcggaaggcaagagcgatgccgtctcccgttatggcggaatcatttgtgtgatattggtacagactgccgcagccgcctgaagcaagcactacacaatccgctcttctgtaagaaacggcacctgaagcatcctttacggcaacgcctgcgcatcgcccgtgttcaatcagcagatcaacaaccgtctcgtgttcaatgatccgaatgccgtccctcagctgccgaaccagaaactcaaccagcatccgtccggtcgcatctcccccggcgtgcagaatcctccttttggaatgagcgccttccctgccgagacaaaacgttccgtccgacttcgtatcaaaagggaaaaggccttctatcagcctgtttatcatgctctgtccgctttgcagcaaatgccgcacggctgtcacgtcattgtgtccgcatcccgcatacagtgtatcgttcacatgggattctatcgagtcatcttttgcgtatgaaacagcaatcccgccttgagcataatacgaattgctgttcgttacgtttctctttgtgatgacggttacttggtatgacggaggaaatgaggaagcacaggcaagggccgccgtccccgtaccaatgacgataattgttttttcagacatacatcaccctcccattatatttacacctgtcttgacacctatatttacacaacgataaaataaactcaagctttttttaacataaacggataggagacgggctgtatgatttatcttgattacgcggcgggaacgcctttaagcaaagaagccgcgaaagtctttcagcatctcagcacagaggtatacggcaatgctagcagccttcatgacgccggaggaagagcggcggacgtgctggaatattgcagacattctgcaggaaaattgatcggcggagcggcagacggcattcactttacaagcggcggaacggaagcgaacatcttggccgtccaatcattgctgtacggtctgcccgatcataaaaaacattttattacgaccgcaatggaacaccactcgatccataatgccgcggcgtttttagctgaccggggaattgatgtcaccatcatatatcccgacgaaaacggccttataaccgaggacatactggcggctcatatccgtcctgacacggggctcgtttccatacagcacgccaattcagaaaccggcctcatccagcctgtgaatcgtctggccgcttttcttcaccagagaaacattttactgcattgcgattgtgttcaaagtttcggcaaactgccgattgatgcggatcaggcgggaatcgacgccctttccgtctccggtcataaagtatacggcccgaaaggcaccggggctgtttacattcggccgggtgtcagctggaatccggtttatccgcataccgtgcatgaaaacgggttcaggcccggtacggtgaatgtgccggccatcggcgcttttaccgctgctgcggagtatgcagtgaaacatatggaggaacaccgtgagcatgctgacaggctgaggaattatttgtatgaccaaattaggcgtcaaggcctccccatttcattttcagaggaagaaaccggcggtgaatgcctgccccacattgtcgggtgtttttttcactcctttgaaggacaatatattatgttagaatgtaatcgtaacgatatttgcatctcaaccgggagcgcatgttccgccggcagccacggcccttcttcagctatgaaggcgctgagaaaaaccgaacgggaagcgcggcagtttttccggatctcattcggaaacgaaacaacatgtgaacagctcgatatgctgatacatacatttacggcgctatgggagcaaaagaaaggagaatcagcaatttgacagaaggaacgaagcttactggggcgaaaagacgcgacatgctgcttcattggctgaaagaagccggctcgccattaacaggaggcgaattggccaaaaaagcaaatgtttcaagacaggtgatcgtgcaggacatatcgctcttgaaagcaaaaagcgaaccgattatcgcgacgagccaaggctatttatacatcagcatgaatgccggcggcgaaaaaaacgccgaacggattgtcgcctgtctgcacggcccggagcggacggaagaagagcttgaactcattgtcgatgaaggcgtcaccataaaggacgtcattattgaacaccccgtatacggcgatttaaccgccgccataagagtcagcacacggaaagaagtcaaacaattcatggatcacattaactcgacaaatgccgcttacctttcacagctgaccggaggcgtgcatctccatacgttaagcgccccgacaaaagagcggattgaccaagcctgtcaagcgctggacgacgcgggtattttaataaaagattaaaaaaaaagccccctgaaggggagctttttttatatcgaataggattgatatgttcccagaagcttgacccggcagccgagggcttccatctcttgaacggcaccgggaatgagaacctgatccatcgcctgttcaatatcaataataaagaaatagttgccgagacccgttttggtcgggcgcgattcgatctttgataaattcaggtttctccatgaaaaagcggacagcaccctgtgcagcgcgcctgattggtcatcttggggaagcgttaccatcatcgtcgttttcggccgtgaagacagtttcgcattcacttcgaatgagacgtctttttcaggcgaaagaatgacaaatctcgtgtggttgtcctgataatcctgaatatcccgcttcacgatgctcaatccgtatgtagcggccgccatttcatttgcaatcacgccgatcggaaggtccgaatgctcactgacatacttggcagccgcacctgttgacttcgcatactcataaggaacggacgaaaaatgccggtgaagaaatttgtgacattgcgcaatcgcatgggaatgagaataaattttctcaagctttttccactcattttctctcgaagggtgaacgagcagatgctggtgaatcggcagcgtcatttcccccacgatcgcaagaggctgctcatgaatcaagtagtcaatcgttaagttaaccgagccctccagcgcgttttccaaaggaacaaatgcaagatcaacttctcccgcaaccgccgcatccatgcatgccggtattgtttgataaggtgcttgtgtcacgctgttttgaaagcaggaactgactgctagatgtgtaaatgtggcttctggccctaaataaccgactttcatgtctcttctctccttacgcgcctgaccctaagatctcaactttttctataaaatcaaattttctcagtttattcattaacgtatgaatgttttcttccattgcggacgtactgattgagagcgtgacattcgccctgccctgaagcggaatcgtctggtgaatggaaagcacgttgcttcctgagtcagccaccgcctgcaaaagctgggataacgcgcctgaccgatcctccaaatgaaagaaaagtgtgattatttgttctttaaccatcgtgtaaaaagggaaaaccgcatctcggtatttgtaaaaagcgcttctgcttaaatcaactttctgcacggcatctgcaaccgattcagccttttttctgtcgagcagctttttgacttcaagggttttccgcatcgcatcaggcagaacgtcttcacgcactaaataaaatgtctcttctttcacctgcacccctcccttttacatcagagagcctgcattgcaagctctccgtctttttaatcaataaattcaaattcaaattccagcagccggatgatatcgccgtctttagcaccgcgttctctgagcgcttcatcaacgcccataccgcgcatctgtcttgcaaaacgcttgacggattcgtcacgggagaagtcagtcattttaaagagacgttccagactgtcacctgaaagcacaaacgcgccgtccggatcacgggtaatgtcaaatggaatttcttcatcttccatcgtgtacattacacggttttccgccagttcttcttcatcatacagcgggaattcaggcgttgtttccagctggttggcgacttcaaacagaagatcgcggagtccttctctcgtcaccgcgctgatcgggaagacaggatggtcatcctgaagcttttctttaaacgcttttagattttcagccgcttcgggcatgtccattttattcgcaacgataatttgcggacgctccgtcagccgcagattatattcactgagctcctgattaatggtcacataatcctcatacggatcacggccttccatcgctgacatgtcaatgacgtgaacgatgacgcgcgtccgttcgatatggcggagaaattggtggcctaagccgactccttcgtgcgctccttcaatcaaaccgggcagatccgccatgacgaagcttcttccgtcatccgtttccaccatgcccagattcggaacaagcgtcgtaaaatgataatcggcgattttcggctttgctgatgaaacgacagacagaagcgtagattttccgacgctcgggaagccgacgagacctacgtctgcaagcactttcagttcaagcacgatatagcgctcttttccgggctctccgtgttctgacagctgcggcgccgggttggccggggtcgcaaagcgggtatttccgcgtccgccgcgtccgccttttgcgatgacggcgcgctgcccgtgctctgtcagatcggcaatgacctgttttgtatcgtcatccgttacgactgtgccgggcggaactttaacaaccatatcgtccgcatttctgccgtgctggtttttagacatgccgtgctcgccgcgtatcgctttgaaatggcgctggtaccggaagtccatgagcgtgcgcagtccttcatcaacctcaaaaacgacgtcgcctccattacctccgtcaccgccggcaggcccgcctttcggcacatatttttcacggcggaacgcaaccattccgttaccgccgtcgccgccttttacatatactttcacctgatctacaaacataatatcctccgttctaaaccgtaaaaaaccgctagttcattccaatttcggccacacattcatggccggtcagctcaaattgcatgacatcaaagtcctcataccgggatttgcgaaattcatcaaacacatctgcatttgcaatcgttccatgaaaatcgagatatacaataagctgtctgtcagggtgatccgtctgcagcgatacggtcagatgattttcactttcattgcttaccgccagaccgaacagatgaaacagttttctcatcaggttcgacagcttttgatcatatgccgataaatctttaatttctccgagcacttcgtattcgagcctcatataacgggacttccaattaaatgtcagaaagtcaaacgccaagtgcggggttttcaggtttgagagctttgactcgtgctttgcatctatgaccatttcgtcgattatttcaacgaccctgtcatacttctgcaaacttaagtttccttttatcagctgcagcttattcatccaatcatgacggaaatggcccattaattggatcagttcattgatcagagccgcatcgcttacaggttcttcttgtttcttcgatacatccttcattttcgcactcccaatcgtttaatttctttttaggagtcttgataagtgtgtactatgaattataacagagaaggctttgttaaaaaaacacttgtttttcctggttcatcatgttcctttttcggatcgcatacaatgcggatgccaggcagaaacatttttggtatcactgcttggggaacatatccagtgggtatgagaagctgatgtcctcattcaaggcggggttcactcacgcatcctctgcttttcattcttgatgttactccgcttactgcaaaaaaaactccagtcaacgaccggagttttttgtgtcattattgagctacaggatatacgctcacttttttgcggtcacggccgaaacgttcgaatttaacagttccgtcgattttagcaaaaagagtgtcatctcctccgcggcccacgttttcacctgggtagattttcgttccgcgttgacggtaaaggatagatccgcctgttacgaattgaccgtctgcacgtttagcgcctaaacgtttagattcagagtcacgtccgttctttgtagaacctacaccttttttagaagcgaaaaactgaagatctaatctaagcatgtaactcacctcctatatttggtttgcagtcaaccgtaagtgttcactgtaatcccgctcgatcgtttcaagagaaacaatcatgccttcaatcagcagctgcgctttttgcaaagcttcctgatcagcggcttcagggaattcaaaatagaaataacccccgtcctcgcctatatcaagaatcggttcgagaggagccagcgcgataaccgcattgaccgctccgaaaacgacagccgtgaccccggcgcaaacgagatctcgtccatgttcagcaaaatcggcatgtcccgtcatttcaaaggacaaaatgcccccgtcattccgggatcttcgaattgttgcctcaatcatgcttacgcgttgattttttcgattgtcaatttagtataaggctgacgatgaccttgttttttatgaacatttttctttggcttgtaacggaaaacagtgatttttttcgcacggccttgtttttcaactttagctgtaactgtcgcgcctgcaactgttgggttgccgactttcacgctgtctccgccaacaaacaatacgtcttcaaacgtcactgtttcacctgcttcagcagcaagtttttcgatgtaaacagtttgaccttcttcaactttgatttgttttccgcctgttttaatgattgcgtacattctctgcacctcctattagactaagactcgccagcaacaggggctttaaagctcttatcacctgtcccgagcggttgtagcattggtgctacatccataacattaaaaaatatatcagaaccaaaaggatatgtcaatctatttctagtaaggcagcagcaggtcttccatagaggaatctgtccgtttatcggcaaaatacgcatgaagcacttcattttcatcgagctggctgagcttttcgccggctttttcaatgataatggggtgcttgcatccccgtttgaattcagccatgacatgctttactttggcatcggccgcgaccgtcaaaggatgcagcatggcgacatcgcggtttttgccgtagtatctctccaaaagaaacctcagctgaatataatgccgcttccggtattcatcccataaagaagcggcgagaaagacgaacagcacccatgcgctgacctgaagggggacggccagcacaatccagcagcagagcaaaagcgcggaaacggccgatgtctgcaggctgaggagatgcgctttttgaaaagccatttgtttagagaagtataaaaacacgaacttgccgccgtcaagcggccagatcggcaaaagattgatgaaaagaatggagaggttataaaaggtaaacatctcaaatgtctgctcacttgcaaaacctgacgtgaaaaagagccaggctgccgcctgaagccacacatgctgaagcgggcccgccaaaatgaccgcgaattcctctttaagcggccggtttccgtgctcctccacctcaaccgtcccgccgaaagggagcagaaagatgcgtttaatgcgccacgaaaaaaacacagccagagcagcatgccccagctcatgaacggatacgaccagcaaaagacacagcagcgctttgatgtgccccgtcataagaccgagccccatgataatccaaagaaaaggatggacatgaattttaaaaaggaggatgagccatttattcatcaaatgtgatcacctggatcggatctatgaatttatcgccatcctggatcgcgaaatagtactggcctttacttttatcgttgagcttgatcgaaccgatctttttccctttatcgacaaaatcgtacaatgaaacgttaacatctttcagccggccgtaaatgctgcttgtattgtcggcgtgctgcaccttcaccgtcagccctgtttttttatctttgctcacttccataatgtagccttcttttacgctgtcaatggcttcactggcggtttcgacgacgacgccctctccgttattttgaaagtcctgctggattttccccgcggcaggaacggccatatcctgactgaccgccacctgaccgtccttctttttcgttcccggcgtaagaaaagcgagcgggtttccgaaggaagatacgaaccaattgcttacggcagcaaactgaaattctttttgaaaggtttgtgcgattgccggtttgatctgactcagcggctgtttgtcagttttataggcaatagcggagatcagtacgagacaggcggccagcaggcattttaaaataatagaatgagcgctgatcaatggatgccgcccgttaaattcgggcgggtgttccgtttgatattcgtagtccggaagaagcttgtgcttttcctgctccttgaccgtctgccacgcgggaaaattctgcgtttgagcgttttgaacgaaagtccgttttgattcaggccgctgttttcttcttttggccagtctttttctaatttcatcagctctgtgactcatcgccatcatcctttgcaatcgttgggtttgtacatcctatgtcttgtccattgcaaatatgcgctcttaaaaaacaaaaaagacctgataagctgggcttcatcagatctttgtattctggtatatattatgaacgcacgccgaaaaatgacttgattttcgccatcatccctttttgctgctcttcaagcacctgcaaaggaacggattctcctaaaatgcgccgggcgatattgcggtacgcaatgctggcgcggtttttggaattcatggcaatcggttcgccgatatttgaagccctgatcacttcatcatcgtcagcaacgattccgaggagatcaatagacagatgatgaacaacctcatccacatccatcgtgtcaccgtttttcaccaggtgatttctgatacggttcacgataaggcgcggcggttcgatatcttcctgctccaaaagtccgataatgcggtcagcgtcccgcaccgctgatatttccggcgtcgtcacaacaatcgccttatcagctccggagacggcatttttatagccttgttcaattcccgccggacaatcaataatgacataatcaaattcctgcttaagctcctgcacaagcgatttgatctgctcagggacaacagccgtcttgtcgcttgtctgggcagccggcattaaatgaagcagatcatcaaaacgtttgtctttgacaagcgcctgatgcgtcttgcatcggccttcaattacatctactaagtcgtaaataattctgttttcaagacccattacgacatcaaggttgcgcagtccgatatctgtgtctaccaaacagacgcgcttccctaaaatggctaaggcggtaccgaggtttgcagatgttgttgttttacctactccgccttttcccgaagttattacgatagcctcacccaatttcacattcctccctcaagccttgttagatcaggtcttaaatgagccaattgctgaaggcgttcaatgaccatatttccgtcagtatctaaataagcacattccatgtcgttccctttttgaatgtggtctggggagcgatttaacacgtgattgatcctcaattgtgtcggcatcatttcggatgcggcgatcacagcccggttatttccgttataacccgcgtgggcaatcccttttaatgaaccgagaacaaatatatttcctccggctctgatcgtaccgccgggattcacatctccgattaaaagcaaatctcccgtcacgtgaagcacctggcccgaacggacgattttggaaaccgaaacaatttcctgctcctctttcatccgctgcgcttcttctttggcgatgacttcactgtcaattgaatgcacgactaaatctttctttgacgcgatcagatcagtcagctgctctgcctgttcctgatacagataccgatgcccgagtttaatatgaacactgattttttggcctttgccatcagtatattgttcaatcgacagcatgttttgaagaccatcgaggagctcatcaaaagaacacgcatcatccagatgcaatgttaagccgttttttgttccttttattgttacatattgctgctttttggtcttcatcaatgttcacctcaacaacatactcttttcgtcaaaaaaagataaaatcctttttactcatctcttaattctttcttcagacttatataaaacagcctgaagggcaggactaatataacggctcccgcgatattcagcaaagcggtcggcaagaatcgctgaatgacaaaatcgttaaacgtcatagtgccgctgcggattaacgtctgaatgccgtagacgtaaaattcaagcacacatacgctcagcaccgcgaccagaatgaccatcagggcgtttgtctgcagcactttaaacgctttggccgccagatagcataatccggcaaaaccaaacatataaacgcctaaaacacccgtataattgatgtcataaagaaatccgaaaatgaaaccgtagatcaccgcatgcttttggttgatataagccgacataaaaatcagcgcaagcaaaagaaaatgcggaacgacctgctgctcgacggaaacgaaaggaaaacgcaccagatcggtatagatgctttccgcacaaaagaccaaaatcataatcaaagggagaaggaaacgtttcacgatccttcctcccctgttgctacgcttcggttcacgacgatgacatggtcaagatcgtacaagtcggcagccggtttcacataagcgattttcgtcaggccgtaagcatctgattctacatcggtcacttcgccgaccgtcagcccttgaggaaatacgccgcccgttccggaggtctccacgaggtcgccttttttcacttcacgtttttcatccggttcaaggatggtcattttcagggtctgtttctttttatcatacccttcaattaaaccgtagcctttgcttccctttttgccggagattttggtggccactctgttattgcggtcaacatcgctcagcagctgaacggcggatgtgaaactgttgagtccgctgcttttgatcttcccgaccagcgcacccttttcgttcgtgacagccatgtctttggccactttgtgcttcgttcccttattgatcatgatctgcttgtaccattgatcagggtttctggcgataacggtcgctaaaatcggatcatagtcggaaattgatttgacatgcccgagttcatcacgcagcttcttgttttcatctttgagttcttggagcttcgcttcatattgtgtctgtccgtccagcttttgtcttaagcgttcgttttctttgtacgtgtttttcaggtcttttatgtccccgaagaaccctgcaaaatattcggcaggcgtgtgaaaaatgttttgaaatactcccgtcgtatcaccgatcagcttttcaggccaggtggtattacggccgttcttcagcgagaatccaatcatagccaccaatatgataatacacagaagtaatagcattaaccgtttgttcggcatcgtgatacacctcttctatttaactcctgattatcttgtttttcctttgaaaagatggatgtgctccagtgcttttccagtgccgatcgcaacacaatccagcggatcttcagcgataagaacaggcattttcgtttcgtcgctgatgactttgtcgagattgcggagcagggcgcctccccctgttaatacaatacctctgtccataatgtcagcggccagctcaggcggtgttttttcaagcgtgctcttcaccgcatcaacgattgagagaactgtatcacgcagtgcatttgcaatttccgttcccgtgatttcgatcgttttcggcagacctgtcagaagatcgcggcctcggatttccattgacgcattttcttcaccggtttctgctgaaccgatttccattttaatggcttccgccgtacggtcaccgatcatcagattatatgtttttctgatatagctgatgattgagtcgtccatttcgtcaccggctacgcggattgactgagacgtgacaatgccgcctaaagaaatgatcgccacttcagttgttccgccgccgatatcaacgaccatgctgcccgtcggctcccataccggaagattcgcaccgattgctgccgcaaacggttcttcaatcggataagcgtcacgtgcgcccgcttgtcttgtcgcgtcgatgaccgcccgttcttcaacggccgtaatacctgacggcacacacaccataacgtacggctttctcgcaaacaatcctttatttttcacagcctgattaatgtagtatttcatcattgtcgcagttgtttcatagtcagcgataacgccgtctttcatcggacggagcgcaaccacgttgcccggagttcttccgatcatgtttttcgcatcgttaccgaccgcaacgattgacttcgtatccgtttgcagagcaacgacagacggctctctcactacgattcctttacctttaacaaacacaagcgtattcgcggttcccaaatctataccaaggtctcttgtaccaattccgaacatatgtatgtatcttcctttcttaaagcaaaaataccctaaagggaaaaactcataaaatctattatatcttaaatcaacgaaaaaaaaagtgttacaaatatcctttttcctttaaactcacaaattttttatcaccaatgaccaaatgatccagcagctcgatgccgattaaatttccgcactcaaaaagccgcctggttacctctatatcttccctgctcggtgtaggatctcctgaaggatgattatgaacgcaaatgaaggacgcggcggatcgtttgaaagcttctttaaacacctcccgcgggtggacaatagatgaattcagacttccgataaaaacggtgcgtttatgaatgacttgatttttggtatttaaatataaacagacaaaatgctcctgggttaaaaagcgcatatcctccatcacatacttcgccccgtcttccggagagcggatgacgcaatgctccccggcggatgtcttatgaatgcggctccccagctcaattgcggcaagaatctgaacggccttcaccgttccgattcccggaatgctggaaagctcctgggcagaggcgccttttaacaggcgcagcccgtcaaacgtccgcagcagccggtgagcgaggttcatgacggactcatgtttcgttcccgtccgcagcaggatggcgagcaattcattgttagagagatgttcggctccgaagtgcagaagccgctctctcggtttttctttttcggggaaatctcttaattttaacggcagatcacggatgatcaacccctccttgttccccttcccggtttgaacatcaagcttttatattaaattctttcaaggctctcattgttttagcgacaggaagcccgacgacagaataaaaatcaccgtctatttttttcactaaaagcgcgccttttccttggatgccgtatgcacctgctttatccatcggttcttttgtttcaatgtagagctgtatgtcgtcttcactgagcggccaaaacgtcacttccgttgtgtcacagaatgtttctttccggtcacgcgtctgaatgctgaccgccgtaatgacttgatggcttcggccggaaagcctccgcagcatctgtgccgcttcttccctgtcacgcggtttgccgaggcactcgccgtctatgcacaccatcgtgtcagccccgataacgactgcatcgggattttcggccaatacagcactagctttttgctcggccaaacattggacgttttcttccggcgaaaggtttcgatttaatttttcttctgtgcggctcgcaataatgctgtaaggaatctgaagaagattaaggagttcttttcttcgcggagattgtgatgcgagtattaagcgttttgtcatggttgtcatcctttcagggtttgcttaagaaaaaaagatacttgtctatcctaccaaatcaaacgggcaaccacaatttcagaaaaataactttttgatgacaaaataaaaaatcccgccggatgacgggaaatgagatactattttacaacacttaatagctctttttgggctttccagccggattccgaacccgacgtttccagttctttcagcgcttgaagcacggcctctttctgctttttgtcagcggcgtctgcgccgtctgccgcttttgccgcttcagccacttccgtttttgaaagatttttgccggtaatcgctttggcggagagctcagatgcctgtttaaaagagtcttccagccctgaatcgaccgcaaagctgagctcttttccgccccaagcctcaaaatcatggtctatcagtgtctgacccaattgctgtgataagcttttttccgctgcaagcccggcgatcacgtatgtgtatccgtcttcttttgccagagagacggccgagtatcctttttcagtcagctggtcaacaagcgtttgcgctcctttttctgatgaaaattttccggcctgcaccgcatatgttttatagtttcccgctgaagattccgcatctcctgtgccggctgtttcagatttgtcgttagaaacatctcccgctttcaccgtctgcccttgtgaacctttgtcagctgatgccggagcggaggcttctttacttcccgacatatttaaggcgacaaggccgagcccggtgcctaaaacagccgcaacggcaattgtcgtgaccgcttttttaactggagaagacggctgcttttttttcggaaaatgagggcctgtttttttcttctggtatggcggaacgactttcgggtcatcttcaaatacctcagaattcttctcatgatcccaattgaaatcttcttctttcggatcttcatgggaagcggcggtctcctgttccgccttttttgtttcttcccaattggaaaatgtgacggtcttctccccgccttcattcacatcttcttgtccatacatcgtttcttcttgtccgttaatggttactttaagggcattgtttttagctttgctgtgctttttgctcttcctttttttcaacgtctcttcccccttgcattcgtcttggccgtaccttgaactgatcatggttcacactttagcataggcgaaaaaaaaaagaacaagacttttgtcgtcttgtccaaaaaacgttcgccaaatttttcaagccccgcctgaagcgagcttgatgtaaaacgaaaacagctcatcaccgtataaataactcaaagcgctcccggctgagatggccggcgcaaacggaaatggctgctttttaccaagactgccccgggctgcagcgcacataccgtataccgctccgatcataacggaaagaaagaatgcaatgagcacgagcttcacgccgagcgtcaggccgatcaccccaaacagtttcacatcacctgcgccgatgcctcctttactgacaaacatgataaaaacaagcagaaaaaatccgcaaacggctccggcaaaccctgcataccatgaatccagcggagaaaacattcggccggcgatgaaaagcggaagaaaaaacagcagaactttgtcaggaatcagcatatattgcagatccgtcatagtaacaatcatgaggagagacagaaataacagcgcgactaacagttcttttgagaaaccgaaatgaatgcctgcagccgtgaataaacacgccgtccagcattccgccgccggatacataaccgacagcttcgcacggcagtttctgcatctgcctctttgcagaatataggagacgacgggcacaagctccccccaggagagcggcaagcggcaaaacgaacaggatgaacgcggcgaaataaccgagattcgcagcgggatacggcacgctgctgtataaaaaaaagaaccgaaaatcaagccgagaaaaaacagaattaaaagcactcagaccacacctttactatcaatctggctcagattatagcaaagaaaaacaccatgactgaaatggctgaaaatatattttcagcataaaaacacccggcaaaaccggaaaatggtctgccgggcatccgagaggctgtcagataagccgctttctcatctctgaaataaaatataaggagccggtaatgatgatgacatcatccgccccgtctttttgttctatccattctttcacactgtccgggttctcatcgaagctcttagatgcaagactgcttgcattgtaaagggcttcggcgcttgaagcacgcggaaagtcaaatgatacaaagtgaatggaatccgcttcggtttcaagctttttaatcatttcctgatacggtttgtcttttaatgcgctgaatacgacatggacgtttttaccggcaaagcgctgccggatcgtttctgtcagcgtttcaacaccctcttcgttatgggcgccgtccgcaaacactaaagggcggctttgaagacgttcaaaccggcccggccaggaagattttcccagtccgtttcgcatcgcttcttctgaaatgactgcggcctccaggcgattcagccattcagcggccaatatcgccaatgccgcattctgcctttggtgaatgccgatcagcgacgtttgaatgttttcatagcatttcgtttctgtttccagcgaaaagctttcgccggacggaagcgccgcttcattaaacagtctgcacgttttatatagtgactgatacggagcctgctttttttcggcttccgcttcaataacgccgagtgcttccggctgattgacgcccgtaatgaccggaatggaatttttaataataccggctttctgcccggcgatctcctcgatggtattgcctaaaatggccatatggtcatgtccgatacttgtaatgaccgacagaagcggtttcacaatattggttgaatcaaatgtgccgccgagccccgcttcaaaaatgacaaaatcgatatcagcccgcttcgcaaaatataaaaatgcacacgctgtaatgatttcaaattccgtcaccgttccggcatcggtcttatcaagctcatcgactatcggttttatgtcattaacgagcgttctccattcctcatcggtaatcggcgtgccgttgacgctgattcgctcattaaacgtaatcatgtaaggcgatgtgaacgtgccgaccgtataaccggcttcttgaaggacggaacggataaaagaaacggttgatcctttgccgtttgtgcccgccacatgaatggcgcgaatgttcttttccgggtgttccagtttttccatcagcttttccatacggagaaggcccggcttaacgccgaacttgagtctgccgtgaatccagctgatcgcttctttgtacgtattaaacaatgaaatcccctcttttatacgacaaggcggtttcttaggaaaccgccccgctgttttatcagcctttcagctctgcaatccgctgccggacagcttcgcgttttgccgtgtagtctttctcttttccgcgttcttcttcaatgacatgctcaggagcttttttaatgaatccttcgttgccgagttttttctgaacgcgttcgacttcttttgtcagcttgtcgaattctttttgcagacgggcgatctcctcatcaatgttaatcagcccttcaagcggcagaatgacttccgctccggtgacgacagctgtcatcgctttgtctgccgcagcgatatccgtcccgattttcagcgtgctcggattcgtaaagcgttcaacgtaagaacggttcttctcaaggcggccggcaatgtcttcggtagatgttttaatgtaaagttcaacctgcttgctcatcggcgtgttgacttcgctccggatattgcggacagaacggattaattcaacgagcagtttcatatccgccgctgcctctttatccgtatgttccggcaccggaaccggccaagagctgatcgtgattgactcgccttcatgaggaaggtgctgccagatttcttccgttaagaatggcataaacgggtgaagaagacgcatcgtctggtcaagcacgtatgccagaacagaccgggttgttttcttcgccgcttcatcttccccgtacagcggaagcttcgccatttcgatataccagtcgcacacatcgtcccagataaagttgtacaggtggcgtccgacttcaccgaattcataacgatccgcaagctgtgtcacgtcttctatcgtttcattcagtcttgtgaggatccacttatcagcaactgatttttcaccggacagatcaagctcgtcatacgtcatgccgtccatgttcattaatgcaaaacgggaggcgttccaaattttatttgcgaagttccatgtggattccactttttcatagctgaaacggagatcctgtcccggtgaacttccggttgccaggaagtagcgcagggaatccgctccgtacttgtcgatgacatccatcgggtccacgccgttcccaagggatttactcatttttctgccctgctcgtcacggattaagccgtgaatcagcacgtctttgaacggacgctcgccggtaaactcaagaccttggaaaatcatccgggatacccagaagaaaatgatgtcatatcccgttacaagtacatcggttgagtaataccgcttaaagtcttcagcgttttcatcaggccagcccattgtagaaaacggccaaagcgcggagctgaaccatgtatcaagcacgtctgaatcctgctcccaattttcgctgtcctcaggcgcctcaaggccgacgtacacttcttttgtttctttatgataccaagccgggatgcggtggccccaccacagctgacgggaaatacaccaatcacggatgttttccatccagtgcaggtacgttttctcgaaacggtcaggaacgaagtgaaccttctcttcttttgcctgaaggtcaaccgcagcatcggccagcggctgcattttgacaaaccattgtgtggacaggtacggctcaacaacggcgccgcttctctcactgtggccgacagaatgcatatggtcttcgattttaaagagaacgccggattcctgaagatctttgacgagttttttacggcattcaaaccggtccatgccgttatattgcagcgctttttcattcattgttccgtcttcattcatgacgagaatccgctctaaattgtggcggtttccgagttcaaagtcattcgggtcatgggcaggcgtgattttaacggcgcctgatccgaattccatatcaacataatcatcgccgacaatcggaatttcacggtttgtaatcggcagaatcaccgttttgccgattaagtgcttgtagcgctcatcttcaggatgaaccgcgacagccgtgtcgccaagcatcgtttccggacgggtggtcgcgatttcaattgagcctgaaccgtctgctaacgggtagcgcaaatgataaaacgcgccctgtacgtctttgtaaatcacttcaatatcggataaagccgtttttgtggcagggtcccagttgatgatatattcgcctctgtaaatcaagcctttctcgtacaacttgacgaatacttcacgcacggctttgttcagcccttcatcaagagtgaaacgttcacgtgaataatcgagtccgagtcccatcttggcccattggctgcggatgaaatcagcatactcttctttccacttccacgtttcttctaaaaacttttcacggccgaggtcataacggcttgtgccctgttcgcggagtttcgcttcgacttttgcctgagtggcgatgccggcgtggtccatgcccggaagccagagcacgtcatagccctgcatgcgtttcatacgcgtaacgatatcttgcagcgtcgtatcccacgcatgtccgaggtgcagcctgcccgtcacgttcggcggcggaatgacgacagaatacggctgtttcgtttgatcgccgcccgcttcaaaatattttcctttcagccaaaaatcatagcggcctttttcaatcgcagacggatcatattttgtcggcattgtttgttcgtttgtatccatgataaccctccagcatgtttagaaatggctgagcaactaaaaaagagccttcatcctgataaaggacgaaaagctctttcgcggtaccaccttttttcatgaacagatttgttcatgcacttaaacggataacgggtgcggcccgaatttctctactgtatgttcaagaaattatgctcccgggcgaccttccaatgagacggcataagaagcctttcagcacagtagcttctctctcttcatgcgtctttcttgtactcttcccgttcaaagcaggtgtatttatatcagctcatgatcttatttattatgttctttattatagtaaaagtgtttttgattcgtcaatcatcttttccaaaaaccgctgccgtcatacataaatgggcatgcaccccgctcttccccttacatacgatacatagaaaggcgaatgtgaggaggaattgcccgtgagaaaaaaattcaattcttattcgctcccccagtgggccagacaggtccgccttgtatccgtgcaagtcattattccgattacgatctttcaggggatcaggacgattttctttccgacgacttttgatgtcctgctgcttgccatcctgctgtttttagcgtgcgccctgcatttggaatggatataaaaaaacgagtcctgttatgaagaggactcgttttccgcttttatttttttctcccgctcaatctgatgaaccttcatgagaaaaggctcaacatttttcatctgccaaaacgctcttaataattgcgtgcactcttctttttcagagcccctttggccggtctgataccgtttcagcactttgtacatggcggacggataagccatatagctgagaaacagactgatttccgcttcacggagcgggaatgatttgtgatacgtataaaaccagtccagacattccggacatgctttcggatagcttctgaacattctggagtaaaagccgagcaggtcattttgcggagggcccagcgcagctttctcgaaattcgtgaaaaagcccgatcccgcatcattatacagaaagtggcggctcgataaactgccgtggttgatcaccgctctcgtcttgtcatgatcctttgccgcgtcaaaccattcttccagacgttccagagcaaaattgacggcggaaaccgtttctgtaagatacgtaacggcctgcagttcaaaaggtgaaaggtaccactctttttccgcccggtcggcgaattgttcatagacaagcttatcattttcccaatctcttttcgttgcttcataaaagccgctgatatcttcagtccggatttggatgtcccgcacagtcgcagaatggagcttcgcgacctctttaaaaaggtaaacatgtttttgatcccgttcttcctcctgatcgtactgaagccaaggcattaaataataagaattctccgtctgtctccccgcaaaaaaatcgccggcatacgtgcggcagatcggcacaaatgatcggtagcctttctcctcaatctcaatcataagatccgtaaattcactgctgcgggccggcttgagctgtttcaaagcaaaaatgccgtagtttgagtagaccttccaaacatgcgggctgacaggctcaatatactcagccgccagcccgtattcctgaagcactgattggactgcttccattccattcaccacatttttacggcctctttgtgcttacacatggctgttattatattcaggtatatacagaagctgaccttcctcaagctcgtcatcaaacgataaagcattcgttcggatgagctgctgggatgtaatgtcatatcgttcacacacccggtcgattgtatcttgctgctgcacgatacaaattttcattcttgaaaacttttcttcttcccttgtaaataattttgtcaagtaatgagagttgtcattttccttctgctcggttcccggtgccgcttcttcattctttctttcaggcttaagcggctcaggctgttcagcttgcgccggctcctcaggcggcagtttggaaaactgaaaagacaaatcgagaggcttcccggtttcctcctccggcggcgccatcttccttacctcaatttcaaacccttcttcaccatgagcctcttcttcaagcagcttaggagcgctgtaaaactcctcttcctgccgttccggaacgaactcgcgataaacgggcgcctgctcctcttgaaaaaccgcaggctcatcttcgtcttctgccgccttatgatcgctctgacggagaagcggctcggcctctggctgctcttctttttgaaggaagggctgttccgcaatttttggtttttctgcatgcggagtcagagtgaaagcagggaaaaccggttcgatatcatctttcggctcttcctgcacttctgctgaatcatcctcaaatacgggttcattcctcacagctgacatgattgcaggctcctcagcttcttccggctcttcttcgtgctggaaggaaacgggaggaggaggctcagtaaaggaaacaggtttaggcacctcttcttgctccctcagaatcggggctgcttcctgctcttcttcttcttgctccctcaaaaccggggctgcttcctgctcttcttcttcccgctccctcaaaatcggagctgcttcctgcgcttcttcctgctccctcagaatcggggctgtttcctgcttttcttcttcccgctccctcagaatcgggcctgcttcctgctcttcttcttcccgctccctcagaatcggagctgcttcctgctcttcttcctgctctctcagaagcggggctgcttcctgctcttcttcctgctccctcagaagcggggctgcttcctgctcttcttcctgctctctcagaatcggggctgtttcctgctcttcttcctgctccctcagaatcggggctgtttcctgcttttcttcttcccgctccctcagaatcggggctgtttcctgctcttcttcctcctgcctgagtaaaggcgggatttcttcctcgttcttctctgtttcttgtgctgcttcttctgatacagtcaaaggtatttcaggctcatggcgtatcattaattctggttcattttcgtcctcagaatgatgtccggcaagattgatcatttcttctctggaaaattcaggcgccacgtacaaagggatctccggctctttcggctcggattcctcaagcagcccttcaattgccaaatcagcttgaatggttaagatccttgaatccgtcagctgataatcaaaggcatcaataaatacgaaaacatcattgaggtggctcactttatttttcggaatcgtgatgtccaccgggaaacaatgaatgagctcggccgtgccatcctccctcgccctcacttcctctacatgcctcagctccctatcaagctcttcaaaatgactgctgtgatctatgttgtactcgccagtaagttctaatgatcctttaattgagacataatcatttacttcctgcaccctgatgtcagggtctaatgaaatcgaaagtaattcagaaacttcctgtcctttttggaaacagattgattcttcaacagaaaattgcaatcggtgattatgcggcaagttcatatcctcctttcatctaatccatacaattagatgtcactaaaggtgtatgccgcaatccgggaaaatatgataatggaggcattgaaaaaagccgatacaagtcttgcttgcatcggcttttcggtatcagcggctgatcgcctggaacactttctcagcggcttgaatggtattttcaatatcctccattgtatgcgcagtggagagaaacaatccttcaaattgagacggcggcagaaatacgcctgcgtcggccatccctttataatacttggcgaacagctttaaatcagaagatttggctgcttcatagttaatgacaggctcattggtgaaaaagaagccgatcattgaccccgcccggttaaacgtgtgcggaatgccgtgtgctgcagctgcttttgaaatgccttcttcaagcatatcgccttttttcacaaattcttggtaagattcaggtgtgagctgctgtaacgtctcaagtcccgctgtcatggcaagcggatttccagacaatgttcccgcctggtagatcggaccgctcggcgcgattcgttccataatgtcagcttttccgccatacgcaccgacaggaagaccgccgccgatgactttgccgagacacgttaagtcaggcgtcacgccgaaatacccttgcgcgcagttataatccacgcgaaaaccggtcatgacctcatcaaaaatgagcagcgcgccatactgttccgtaatgtcgcgaagtccttgtaaaaagccttcctgcggcggaacaacgcccatattgcctgctaccggttcaacaatgaccccggcaatatcttcaccgtactcccggaatgcgagtgcaacgctttccaagtcgttgtatggaacggtaatcgtattcattgctattccttccggcacgcccgggctgtccggcaggccgagtgtcgccactccggatcccgctttgatcagcagcgaatcaccatggccgtggtaacagccttcaaatttcaaaattttgttgcggccggtgtatcctcttgccagacgcagggcgctcattgtcgcctctgtgccggagctgaccatccgcacgatttcaacagacggtacacggtcaatgaccaatttggccagttcgttttccacttcagtagatgccccgaaacttgtcccgttctcggctacttttttcaggctttcaacgaccctgtcgttcgtgtggcccaaaatgagcggcccccagctcagcacatagtcgatatattcattgccgtcaatatcaaaaattttcgatcctttgccgcgctgcataaagatcgggtccatatcaactgatttaaacgcgcgcaccgggctgttcactccgcccggcatcagtttctgcgcttctttaaaagcggcttttgatttttcatagcttctcatctgcctcagctcccgtcaaatgaaatcgttactcagcaagccatttcgctgcgtcttttgcatgatacgtcataatcagatcggctcctgcacgtttcatgcccgttaaaatttccagcaccatttctttttctttaatccagccgttttgggctgccgctttcaccatggaatactccccgctcacattatatgcgaccagcggcaggtgatggcggtttttcacatcacgcataatatctaagtatgacatagacggtttgacgattaaaaagtcagcgccttctgccgcgtctgattcagcctcacgtagcgcttccaggcggttggccggatccatctggtatgtttttcggtcaccgaactgcggcgtgctgtcagccgcgtcgcggaacgggccgtagaattcacttgaatatttcacggcataagacatgatcggaatattcgtgaatccttctttgtcgagcgcttccctgatcactgtgacaaaaccgtccatcatatttgaaggagcgatgatgtcagcgccggctttagcctggctgacggctgtctgcgccagcagctcaagcgactcgtcattgaggattactccgtctttcacgaccccgcaatggccgtgatccgtgtattcacagagacatgtatcagcgatgacgatcatttcaggataatgctttttaatttcagcaatccctttctgcacaatgccatgatcgtgaaaagcctgggttccgcaggcgtctttttcttccggcacaccgaaaacgatgaccgacttaatgccgagcgatatcagctcagccatttcatcctttaacaaatcgagtgatacatgataaacccccggcatggaaggaacttctttttttccttcgagtccttcaacgacaaataacgggtaaataaaatctgaagggtgaagacgtgtttcttttactagatctctcatcgcagcgttcgcgcgcaaacggcggtgtctgttaaatgtttgattcatcattatctatcctttcccgacatgctgcacatgacgtccagcatgccttcaatcgtataggtgtcaggcacatgggatgagatcccgtattccaagagcgctttctctgtcaaagggccgatgctgatatagctcgcaccgctgttttcccacgctttttctccgtctccgaccgcgtgcataaacgtatgcaccgccgatgaactggtaaacgtaataaaatcaaaatgagagcgggatgcagcccgtctcagctcgtccatgcctttttcatcctgaatggtattgtataacacccattcccttatttgatagccaagcggctcaagctccgcttttatgacatcgcgtgataaattgccctttatcaatgaaacgggttcggcagctgatgcgtgccgttttaaagtatcagccagacattccgccacatactcgtcaggcatcgcatccgtccgggctccccgctctttcagggcgcgcgctgtcttttcaccgacggctgcgatttttttccgttccggaagcgcaaggccatgctgatcaaggtaggaaaaaaagaaccggacaccgtttacgcttgtaaacacaagccagcccggttcagaaaggtcttcccgcagactgtccgcacattcatccgggagcgcttcctgaaaagcgatcagagaggcggaaacagccgttccgccgagcgcctccactttttttcgaaacggtgctgcctgtcttttgttccgggtgacgagcacggtctttccttgtaaaggaaggtcatttgccatcctgttcgagctcctgtttcacgctgtcgattagtgctttggctcctttttcagacatcatcgccgcacagcgtttcccgatttcttccggatcatgtcccgccgctgtttctttataaatcgtctttccgtccggagacgcgacaagaccgaccaattcaacctcatcccggtcattgacggacgcatacccggctatcggcacttggcagccgccttccatcgcgtgtaagaaagcccgttcggctgccaccgtgcgctgcgtatactcatcggtaaattgcgcaaacagcttcaaaagctcttcatccgactctctgcattcaatggcaagagcgccttggccgaccgcaggcagacagcggtccggttcgaggaattccgatacgacatcatctttccagcccattctcgaaagccccgcagccgctaaaataatagcatcgtaatcttccgtttcaagcttttgaagtctcgtatcgatattgcctctgatccacttaattgtaaggtcagggcgttcagcaagaatctgggcgcttcttcttaaactgctggtgccgatgatgcccccttcttttatgccgtccagcttttgatgcccttttgaaatgagcgcatcacgcggatcctcacgtttcggtatgcagcctatgacaagaccctcaggcaaaacggcgggcatgtctttcatgctgtgaaccgccatatcaatctcctgatgcagcagcgcctgttcaatctctttgacaaacaaacctttgccgcccacttttgacagtgtaacatcgaggatgcggtcgccttttgtgacaatctcccggatttcaaagtcataggaaggattcaattccttcagtttgttaatcacccattttgtctgggtcatagccagtttgctccgtctggaacctaccttaatcgttctcattttctttcctcccgaatctgtttgggcgcgtgcgttaactgaaccaatggaattgtgacaggcttccgagcaggaagtaattaatcatcagcacgagaaaacatgctgaattccataacgccgccactttcccctgcagttccttaatcattctgatatataaatagtagctgtataaaagcagcacaataaacgagccgagcacttttgagtcaaaccagtacagcgtttccagcgacacatacgcccagatcacgcctaatatcaggctcaacagcagcatcggaaccccgatgacatttaaaacgtaagccatataatcaagttttgacaaatcttcaattctcaacagccattttccccattttttcttctttaataaagaatattgaaactgataaagaagcgaaaagacaaaagaaagggaaaaagcgccgtaagacagaatcgccattgtaatatgaatgaccaaaagctctgagaccagctggccggaaaaggcggccgaatgctgatccgtcggtgaaaacgtatggatcgcaatcatcgagaaaccgatgacattcgtgaaaaacacgataaaatcaacccgcagaatctgcgtgaccacaagtgaaagcgtgacaagcacccacgcataaaagtaaagggcctctgtaatattcaagaccggaaatctgcccgtctgccacatgaaataagaaagatagacagtttgcagagtccagacaatagaaagcaaccagaaggctatttttccagccttccggttgtgttgaagaaaatctataaagtaaaaaaggacgcttactgcataaataacaattgtcgcttcattaagtcttgccattgctgtatcaatcatacagccctcactcacttacaagcggacgtaagcccgtttttgcttctgccttttgaaacgaatgaaccgtctggcggttatccaggcttttgtccagctggcggccggcctcttcctcaatatcgaaaatctgcataaacagcttcagcttttcatctgaatccgcttcagccgcaagctctttcgctttcagaatcgggtcgcgcagcatttggttaatgatgcttttcgtatgtttgctgagaagttttttctctctcaccgtcagatgaggcagcttgcgctcaatgctctgcatcgtatcggactggatggacagcgccttttcacgcagcgccgaaatgaccggcacgacgccgagcgtattaagccactgcttaaactcaacaattgccgcttcaataaacagctcgactttttcagcggtttcgcggcgttcttgtaagttggcttcaacgattccttcaaggtcatcaatatcgtacagaaaaacaccttcaagatcgttaagcgccggatcgaggtctctcggcacagcgatatccaccataaataacggacggcctttccgctgtctgcccgctctctccatcatttctttagacacgacgaaatcactcgcgcctgtcgaactgattaaaatatcagcttcagcaagtgcatattcaagctggtttaagctgcgcgcttctccggagaaacggtcagcaagcgcttttgccttcaaaaacgttctgttgatgaccgttactttgccgataccctgaccgtgcaggttttctgcggcgagctcgcccatttttcccgcaccgagaatcaaaatgtgcttatttgacaatgagccgaagatttttttcgcgagttcaacggcggcgtaactgacggaaacggcattggagccgatatcggtttcggcatgcgtgcgtttgccgacggtcaccgcctgtttaaacagctcattgaaaatggtgccgatcgtcttttctgcctgcgccgttttaaagctcgagcgtacctggccgagtatttgcgtctctccgatgaccatggaatctaaaccgcacgccacacggaataaatgctcgatcgccgcgtcgctctcataaaatttcagaaacggagacagctcttctttcggcagcgagaaccattcggataaaaatgtctttatataataacggccggtatgaagctggtcgaccaccgcatatatttcggtgcggttgcaggttgacacgataatgttttctagaacgcttttttcttcttttaagcggagcatcgcttctgcaagctcatccggctgaaaacttattttttcgcgtatttcaataggggcggatttataatctactcccacaacaagaatatgcatcgctttcatgcacccccgtacatcgcaatttatttataatcattctaacatagaatttattatttataataattataacatagtttcttcgggaaaatgtgaacagatttcaaaaatgttatgctatagtataaaaagctcgttcccactgtaatcatcatactaaaaatcctttactgcgggtaggtgacaggatgaaaaaaacatcaattttattaccgggacttctgcttgccgcttcattatttgcatggcttcagagcggacaggttcacctgtttgcgaatcaggggaatggccggtgctccttatgctcttgggggctgtgctcttgtatcagggcaaaaaggaagcggccgggcctcacgtcctgatcggcatgcttcttttcggcataggtttacactttttcgccaaacctgagctctcatggtggccgggagattttgaaatgattctcttcgtcttcggattctccttatttgcggctgccagaaaagaatatgtatacgaagcggctgccatgattggtttttccctctttttatacttctttaaacaaattacggcgtggctggagtccgtccatattccgacggaacacttcaaaacatactggccgtatgttttcatcggaatcagccttttattattgtttatcaagcggaacaaaactatacgataaaacccaaaacgcactgcgttttgggtttttcattaccggctgatcatttttttaatggctccccatgcttcatctttgccttttttcgtttcagaggaaaataaaatcagctcatcttcaggatccatatcaagcgtctgtttgacaacctttaagtgcttgtcccattttccttttggaatcttatccgcttttgtcgcaatgacgatgacgggaatgccgtaatacttcaggaattcatacatgttcacgtcttcagcagacggcgcgtgtctgaggtcgacaatctgcacgcaggctttcagctcttcgcgggtcgtcatataggtttcaatcattctcccccatgcttcccgctcgcttttggaaactttcgcaaatccgtacccgggaacgtcgacaaaatgcaattcatcattgatgatgtaaaagtttaaagtctgtgttttccccggttttgatgacgttctggccaagtttttccgattgattaatgaattgataaaagatgactttcctacatttgatctgcccgccagcgcgatttccggaagccccccatcagggtactgttcgggtttgaccgcgctgatcacgatttctgactttgtgactttcatttcttctctcctactaaggcatgttccaaaacgtcatccaggtgagaaacgaatataaacttcagtccttctctgacgctttctggaatatcctctatatctttttcgttatctttaggcgcaataatagtggtcaggcccgctctgtgcgcgccgagcgccttttctttcagtccgccgatcggaagcacgcgcccccgcagcgtgatttctcccgtcataccgacttcgcgttttaccgcacggtccgttaatgctgaaacgagcgccgtggccatcgtaattccggcagaagggccgtctttcggcaccgctccttcagggacatggatatgaatgtcatacttctcatggaatttcgggtcgattccgaactgttccgctttcgaacggacataactgaaagcggcctgcgctgattcccgcatgacatctccaagcttccctgtcagaaccagctttccttttcccggtgacaatgacacttcgattgacagcgtatctccgccgaccgtcgtatacgcgagccccgtgacaaccccgatttgatcttcggtttccgcctgtccgtatctgaatatccgttttccgagatagtcggccagatttttctctgtaacggtaatgcgttttctctcctcagacacaatggctttcgcagcctttcggcaaatggcggcaatctggcgttcaagcgttctcacgccggcttccctcgtgtagtagcggatgatgtccgtaatcgcctgatcccgaatctgcaggttgctctttgtgagcccgtgctctttgatttgtttcggcagcaggtgatctttcacgatctccagcttttcgttttcagtgtagcctgacaggctgataatctccattctgtctctgagagggccagggatggaagcaaggttattcgcagtcgcgataaacagtactttcgataaatcgaacgtctcttcaatatagtggtcgctgaatgtgctgttttgttccggatccagcacctcaagcatcgccgaagacggatcgcctctgaaatcagacgacattttgtcgatctcgtcgaggagaaagaccggattttgtttgccggcttttttcatcccctgtataatacggcccggcatcgccccgacgtatgtgcgccggtgcccgcggatttcagactcatcgcgcactccgcccagtgaaattctcacaaaagtgcgccccatgctcttactgattgattttgcaagagatgttttaccgactcccggaggtccggccagacaaagaatcggccctttcagcgttttcgtcagctgtttcacggccaaatactccaaaatccgctctttcactttctctaagccgtgatgctctttatctaagatttccccggcttttttaatatcaagtttatcttctgtttcatccgaccacggaagggcgatgagccagtcaatatagttgcggataacagagctttccgctgagcttgacggcactttttcgtaacggcttaattccttaagcgccgtttctttgacacgctcaggcatgcctgcttcttctatcttttccgtgagcgactgaacttcgccggtttttccttctttgtcgccaagctccttctgaatggctttcatctgttcgcgcaaataatattccttttgagtgcgttccatcgaacgtttgacgcgctgaccgatttttttctcaatctccagcacttctttttcattatgaatggaacgaatgaccttattcagacgttctttaatatccgccgtttctagaatgtcctgcttgtcctttaatttcagcgggagatgagaagcgacgatatccgccattctgccgggctcttcaatatcagtcacagccgcatacgtttctgcggaaatttttttagaaatttttatgtactggtcaaaatggtccagcagcgtccgcataagcgcttcgtcttccacgtcttttgaatcatcctcatgcatcagctgtatatcgaccgaagtataatcttcgagttcggtgtattcaaggatctgcgcccgctgaattccttctacaagcactctgatcgtaccgttgggcagcttcagcatctgtttaatttttgtataagtgccgacggcgaaaatatcctcttcacccggttcgtctatcgaaatatcctgctgagtggctaaaaaaatcatatgatcatgcatcattgcctgttcaagagcctgaaccgacttgtcacggcctacatctaaatgtaaaaccattgtcgggtataccaataagcctcttaaagggaggagcgggatgctgcgttttgtatcttctgccatgtgactgacacctccgtgactttagtatgaaccattataatacaactttttcatcgttgtacaattccgggatcgggctttaatcggcttatccgcctgccctgtatataaaacagtctcttcgtagtataccctttctttctgttctgaaaaaggaaaagatgtcctccataaaaaaaccccattataaaaatggggtttatacggattctttattcatttggatatcaaacggtttttgttctgaaggagggtcaaccaatatgacgtcaagcacttcctggaacgtttttaccgctttaatggtgattccgtctattcgtttcagaatggactgctgattttcataagggataatgaccgtttttgctccggcctgttttgcggctttaattttcggaatgacgccgccgatcggtttgacaagccccgtcaggctgatttctcccgtcatcgccaccgtatggtcgatcgggatgcggtgaatcgcggaaaaaatccccgcggccatcgcgatacctgctgaaggtccgtcaatcgggcctccgcccggaaaattgacgtgaatgtcatagtctgaaggtttgatgcccattgtgcggagaaccgtcagcacattttccacagatcccttcgccatgcttttgcggcggatcgacttcgattggctgccgatgctttcttcctctgcaattcccgtgatattcaggcttcctttgtcctgcgcaggtgtgacattcacttcgatttccagcaatgcgccgctgttcggcccgtagacggcaagtccgttcacgatgccgacttgcggttcatcggcgattttctgctcatttttaggtgtgagctgactggaatgaacaacccattctatatcttcagtcgtgatttcttttctgtcctcagtcaccgccatgccggcagcgatctggatcatattgacggcttcacgtccgtttctcgtatatgcggtcagcacgctgagagcttcgtcagaaatctctttctgaattttgtcggctgcttttttcgcaacgattttaagttcatccttttccagctcgcggaaaaatacttcaagacagcgcgaacggatggccggaggaatttcagtcggcattctcgttgtcgctccgatcaaacggaaatccgccggaagcccattttgaaaaatatcatggatgtgattcggtatttgcgtattttcttcactgtaatacgcactgtctaaaaatacttttcggtcttcaagcaccttcagcattttattcatctgaatcgggtgaagctcgccgatttcatcaataaacaataccccgccgtgagcatgggtcacagccccctgtttcggctgcggaatgcctgcttggcccatcgcacccgctccctgataaatcggatcatgcactgaaccgataagcggatcggcaatcccccgttcatcaaatcgcgcggtcgtcgcatcaagttcaacaaaaacagcctgcttttgaaacggtgactgtttatgctttttcgcttcttccaataccaaccgcgccgcagccgttttaccgactcccggaggaccgtaaataatgacgtgctgcgggttcggtccgcaaagcgctgcttttaacgctttaattccgtcttcctggccgacaatgtcctgaaagcttttcggccgcaccttttctgataaaggttctgataaactgatggcgcgcattttgcgcagctgttccatttccttttttgattctttatctatcgtcactttttgtgttcgctggtttttgagcagattccaaaaatatagtccgatgactatcccgaaaaacagctgtacaaataatgcgatccctgtccaactcatgctggtccctcctgaaaaaacgatttatgtatccaattcattcctctgtccgctagtatctcccagcaaagcccggaataaacattttcagaagggtcaggacaagaaaaaaacctcctgattaattcgggtcaggaggttttgtcgtgttatgctgatgttttatcttggccgacaacagtaccgtcttttaatacaagacgcggcgcttcaccgtctgcgactgtcgctccggtaatgacacatttttcaatatcatcgcgggacggcagatcaaacatgacgtcaagcatgatgccttcaatgatagaacgcaggccgcgtgcgcctgttttacgctcgatcgcttttttcgcaatttcagataatgcctcgccttcaaattcaagctcgacatcatcaagttctaacattttcttgtattgtttgacgagtgcgtttttcggtttagtcagaatttcaaccagtgccgtttcgtcaagctgctcaaggcttgcaatgacaggaagacggccgatgaattcaggaatcagaccgaaacggagcaggtcttccggaagaactttagaaagcagttcttctttttccaggtctgccgctttattatcagagccgaagccgatgactttttgtccgagacggcgtttgatgatttgttcgatgccatcaaatgcaccgccgcaaatgaacagaatgttcgtcgtatcgatctggatgaattcctgatgaggatgtttgcgtcctccttgaggcggcacgcttgcaaccgttccttcaagaattttcagcagcgcctgctgaacgccttcgcctgatacatcgcgtgtaatggacgggttttcagattttcgcgctactttatcgatttcatcgatatagataatgcctttttctgctttttccacatcatagtctgctgcctgaatcagcttgaggaggatgttttctacgtcctcaccgacatatccggcttcagtcagagatgtagcgtccgcgatcgcaaacggaacgttcagaatacgcgcaagcgtctgggcaagaagtgttttcccgcttccagtcggtccgattaaagaaatattacttttagaaagctcaacatcatccactttactgttggaattgatgcgtttgtaatggttgtataccgcaaccgcaagtgatttcttcgcctgatcctgtccgatgacatattcattcagaatctcacggatttcctgcggcttcggaacgtctttaaattcgacttcttcttccgtaccaagctcttcctctacgatttctgtacagagctcaatacattcgtcgcatatatatacacccggtcctgcaaccagcttacgaacctgatcttgcgtttttccgcagaacgagcatttcaattgtcctttttcctcgttgaatttaaacattctttcaccccttaatcttgtctcactttttcttttacctgaagggcaaaagaaaacggttcttgctacgatcgagtatgtattgcattttaccatactttccagtaagacggtaacaatgtgtttcgcacttgcacattctatatgtatgacgaaaaacagcccggcaatgactatcttgccccaagaaaaagagttatatcataattgtacaaaacaaggcacgaattaatcgcgccctgttttattatgtctattattatgaaccatattaacggttttctacaagaaaatcaattgcttttcgaacttttaaatcttctttcatcgcgtcagttgaaccgattgcctgcttgatgttttcaaccggcatgttgtaagcttcagccattttagtcagctctgcttcaacttcttcgtccgttacttcaaggttttctgcttgagcgatcgcttcaagagtcaggtttgattttacgcgttttgcggcatcttctttcatttgctcttttaacgcgttttcgtcttggcctgagaattgagtgtaaagctcaaggttcatgccttgcatttgcagacgctgttcgaattctttcagcatgcggtcaagctcagtgtcgatcatcgcttgaggaacatcagcttcagcgttttcagatgctttcagaacaagctcttcacgcaatttagcgtcagcttcgttttcttttgcttcttcaaggcgtttttttgttttctcggttaattcagcaagcgtttcaacttcttcgtcaatgtcttttgcgaattcgtcgttaagctcaggaagctctttcgctttgatttcatgaattttcactttgaaaacagctggttttccggcaagctcttcagcgtggtactcttcagggaatgttacttcaacatccttttcagcgcctgcttcaaggcctgttaactgctcttcgaagcccgggatgaatgaacctgatcctacttcaagtgagtagttctcagcttttccgccttcaaacgcttcgccgtcaacgaaaccttcgaagtcaagaacgactgtatcgccgttttcaacagcgccttcttctttcacgacaagctcagcctgacgctcttgaagcgctttaagttcgttttgtacatcttcgtcagtaacggcagtgtcatctttttcgattcctaagcctttgtaatcgccaagtttcacttccggttttacagtcacttttgcagtgaaaattaagctttcgcctttttcgattttttcaacatcgatttcagggcggtctacaggctcaatgccggcttcttcaaccgctttagggtattctacaggaagtaaaatatctaaagcatcctggtaaagagcttcaacgccgaaacgctgttcgaataaaccgcggggaactttccctttgcggaatccaggaatagaaacctgttttactacttttttaaatgcatcatcaagagctgttttgaacgtatccgcatcaacttcaaccgttaatacgccttcgttgccttcttgtttttcccattttacagacatgtgtttccctccaaaaatctattcaggttgtgtcggtcttccattctaaagcaatccgcggctttgtcaaagaaaaaaccgctttgaatcagaatcattatgtaatgaactggcagcctgtccaaccgtaattctcatttcagttaaaccgctatacataaatacaaccactatattataacataacgcctaccgctttcaactatatggtgtgatttacaaataagaaatttcttcaatatccttaatcatcgtgcaggcttcttcgagttcgcggctgtcaaactcgtacatcatatgaagttcctccggctcaatgtcaatgccgtgcatctcgtaaccgaccttatgaagcgccgccgcccataaatccgcgttcaaaaacttcggcataaaagggtgcaggacgtacagatgtcttctccacagctcctcgacggcagcatataatgtagggttttcattgcccagcgtttcatcaagcacccggagaacgcgatgcaaaatcggagccgcatcaggctggaccgtttcactcggtatcgcggtcattgaatcgccgaattttgtaatatggaccggtttactgtagtcgtgctcggccatcagcgtcaaaatcattgtcttaataagaggatgcgcgcccggatcttgaagaatcgtttttaagagacccgtgtattttgcaatattgcggtctttaagagaatgaatcagattcatttgttcagcggggctgttcagcactttttccgtatcaagaatgtcctcgtattcctcctcccacgcctcctcctgctgatcgggatcggtcattttgcggctgaattcgagcagccggtagaattgctccgcactttctgcgggcagctggttttcttccagcacagcttcaattgtgcttttgacttcttcatattgtttcagctgaattaaaatggtcatgtacacctgcaatacggtgaaataatggccgtacccttcattcagcattttctcgcaaacttgttttgcttcttccaattccccgagttccagaaaacaaatcgccatgcctaaatgtacgtcggactcggtatcgccgtggcttaccgcctctgaaaacagttcgagggcctcctcatactgtttatccttcatggcggccatccctttatcaaccaagcgttctttcagacgggggaaaggaatgatatcagcttttttcttgtcatgcgtcatactttatttcctttcaggcgcttattttgttcaagtgtatcaacacgcgtcatgaaacacaagaaaggatgatgcacacggtaaaaaaagccgccggacagatgccgggcggcttttttcaggcttgaagccatgaacttcttttcgattcaaactgctgaatgtcgtcctccagcagaagcgttaatgaaatttcatcataaccgttaatcagcatttccttccagtgcggatcgacttcaaatgaaatctcttttccttcactgtcgtgaatgagctggttttccaaatcaaccgtcatatttagagactgattttcatattgaccggcgagttttttccactgatcatacggcatacggatgggaagcataccgtttttaaaacagttctgatgaaaaatatcggcaaatgacggagcaatgatgattttgaagccgtaatcatccagcgcccaaggagcgtgctcacgggatgatccgcagccgaaattctctccggcaattaatatggacgcgccttcatagactttgcggtttaattcaaattcaggatcaggctcaccgttctcaaggtatctccaatcaaaaaacgcgaatctgccgtatccggttctttcaattcttttcaaaaactgtttcggaataatctggtccgtatcgacgttgatccggtttaagacggccgcttttcccgtatgcgtttttaaaggttccatcttttcgcgcactccttacacaactgttttttcttgataaaactttcttacatcgacgaaatgcccgtgaatggccgccattgccgccatcgccggactgacaaggtgtgttctcgcgccttttccctgtctgccttcgaagttgcggttggaagtggaagcgcatcgttccccttcaggcacgacatcattgttcatactgaggcacatgctgcagcctgattccctccattcaaagccggcctcgagaaacacgcggtgcagcccttcttcctcggcctgctgtttcacgctttgagaacccggcaccacaatggctctgacgctgtcggcgacttttcggcctttgatcatatccgcagcctggcgaagatcggtcatccgtgaatttgtacaggagccgataaacacatgctcgactttaatatcttcaattttttgattcggcgcgatccccatgtattcgtaagcgcggatggcttcttttttaccgtcttcagaatcaatcgtttccggcgcaggtatttgggcatcgaccggaagaaccatgccgggattgacaccccatgttaccattggagaaatctcgctgccgtctaacacgatggaatgatcgtatacggcgcccggatcggtttttaacgctttccattctgcggcggctttttcaaattcctcgctttttggcgcgtatttacggtttttacagtattcaatcgtcgtgtcatcaggagcgatcagtcccgcacgggctcccgcttctattgacatattgcagacagtcatgcgttcgtccatagacatgtttctgaatacttccccggtgtattcaatgacatatccggtaccgaatttcaccccgtattttccgatgaccgacaagatgacatccttcgctgtcactcctttttggagcgttccgtcaacgcggatttcaagcgttttcggccgctgctgccataatgtctgtgtggaaagaacatgttccacctcacttgtgccgataccgaaggcaagcgctccgaacgcgccgtgagtcgatgtatggctgtctccgcaaacgatcgtttttcccggaagtgtcagaccaagctcaggcccgaccacatgaacgattccctggtctgcgctgtgaagatccgcaagacggacgccgaactcctcgcaattccgttcaagcgcggttacttggcgctttgcgacttcatctttaatgtcaaaacggttgacggtcggaatattgtggtccatcgtcgcgaacgtgttctgcggccgtctgacctttcttcccttctgccttaacccttcaaacgcctgaggagacgtcacctcatgaatgaggtgcagatcaatatagagaaggtcgggttttccttcaccgctttttacaacatgccgatcccaaatcttttcgatgattgttcgaggcatcatctttgtttcctccctctacctattgaactaagaccgctttctttaaagcgtcatactatagattttgtattcgagccggctaatgcggcttttactttttcagtaatgtcatgcgttccggcatattggccgtcccgggcgatatcacgtgtacggctgccgtctgcaagcacctttgcgaccgccttttccaccgcctgcgcttcgttttcaagtccgaaagatgttctcaaaagcatcgccgctgataaaatcgccgcaaacggattggccatccctttaccggcgatgtcaggcgcagatccatgcacgggttcaaacaagtgaagacctgaacttgataaactggctgacggcagcatgccgagcgagcctgtcagcatggaggcttcatcgcttaaaatatcgccgaacatattttcagttacgatgacgtcaaactggctcggagcgtagatgagctgcatcgcggcattatcgacaagcatatgttcaagcgtcacatcaggaaattcttttgcgatttcatctgccgtttcacgccacagtctgcttgaagaaagcacattcgccttatcaacggacgtcacttttccttttctgccggcagccatcttaaaggcttctctgacaacgcgtgcgatttcttctttcttataaaaaagggtatcgaccgcttccttttctcccgcttcattgacatactgtctgctcggttctccgaagtagaggccgcccgtcagttccctgacgattacaaagtcgacgccgctgatatattcttttttcagcggagacgcctcagacaggctttcaaatacggtcacaggacgcagattggcaaacaggccgagcttttttctgatgccgagcaggcctttttccggtctgagctccggagggttttggtcccatttcggcccgccgactgccccgagcaggatggcgtcggatctttcacaaagagccaccgtctcctcaggaagggggttttgatgggcgtcaatcgctgctcccccgatcagcccgttttcaaattcaaattcatgtccgaattgttcagcaacgcttttcaatacatctgccgctgattccgccacttccggtccgattccgtcacctggaagcaaagcaatgcgttttttcaaatcaaacgttctcctttctattacgagccgaccgcagtccgtctctttaatccgtctaaattgcaatccagcaccaactgccgattcacggcgttcagataagctttagcagaagcttccagaacatcctgcgcgattccccgccctgatgtttcttttccgttcacggtcactctgacataaacttgagccagcgcgtcttcgcctttccggttggattggatgcggtagtctgtcagttcaatatttttatcgatgcagcgcccgagcgtattataaacggcttctacgctgcccgcccccgttgccgcctcttgaatcagctgttcgttttcctgatttttcaaagagactgttgcagtcggcacctgagacgttccgtaatgcacttgcagagacagaaattcatagccgatttttttgtccgtcactttttcttctaaaataagagaaatcaagtcatcatcggtgatttcttttttcttttcggtcagttctttaaacatcgtaaaaaatttattgatttcctcactatcaaactggaatccaagcgcattcaggcggtctttgaacgcatggcgtccggaatgctttccgagtacgagcgcatcagcagtcacgccgacaagttccggtgaaatgatttcatatgttgatttttctttcaggaaaccgtcttggtgaatgccggattcatgtgcgaaagcgttatctccgacgattgctttgttgcggggaacggccatgcccgtcagtttgctgacaagatcactcgtccgcttcaattcatgaagattgagagatgaatcggcttgatgcgcgtcatttctgacatgaagcgcaacggcgatttcctctagcgcggcgttcccggctctttctcctatgccgttaatggcgcattcaatttgatcagcgccgttctcaattgccgaaagtgagttggcaaccgccattccgagatcatcgtggcaatgggcagagagctttacccggctgatattcggaacgtgttccttcatatatttaaagatgtttccgtattcagcaggcgtcaggtaacctacagtgtccggcaggttgatgacgctcgcgccggcatcaatcactttttctacgatttcagccagaaacggaagttcggtgcggcatgcgtcttctgccgaccattgaacgatcggaaagcgttcttttgcatacttcaccatttcaaccgctttttccttaacctcttcccgcgtcattttcagcttatgcttcagatgaatgtcagaggtggcgataaagatgtgaatgcgcgggctgaccccgtctttcagcgcttcccaggctgcgtcaatgtcacctttgacagatcgagcaagccctgttaccgaacaatttttaatcgttcttgcgatttcctgcacggctaaaaaatcacctcgggatgaagcgggaaatcccgcttcaataatgtccaccccgagtctttcaagctgcttggctatcgccagtttctcccgggaattgaggttgaccccgggagattgttcaccgtcacgaagggtcgtgtcgaaaacattaattttgcgcaacggagaccaccgcttccttctttttgccttgtttgacaaacggcatcatttcacgaagctgtctgccgaccttttcaatctgatgctcgttttcgcttgcattgatcgcattgaaacgaggacggttcacttggttttccacgatccattcttttgcgaatgtaccgttttgaatatccgttaatacttgtttcatcgattcttttaccttcgcatcgactacgcgcggtcctgatacaaagtctccccattgagccgtatcggaaatagagtatctcatgcccgccaatccttcttcatacatcaagtctacgatcagcttcagttcgtgcagacactcgaagtatgcgagttcaggctggtagccggcttctgtcagcgtttcaaaacccgctttgacaagcgccgttaaacctccgcacagaacagcctgctcaccgaacaaatccgtttccgtttcttccttaaatgttgtttcaagaacccccgcacgcgctccgccgattccttttgcataagcaagagccgtatctttcgcttcgcctgatacatcctggtagatggcaaacaatgccggtacgcccgcgccttgttcatatgttcttctgacaaggtgtccaggtcctttaggggcgacaaggaatacatccacatcagcaggaggcacgatctgatggaaatggacgttaaatccgtgtgcgaataccaatgacttgcccgccgtcaattcatctttgatttcagcttcatatactttttgctgctgctcatccggaagaagaaccataatgatatcagcctgggcagccgcttctcttaccgaaaagactttatgaccgtcttcttgggcctgtgtaaatgatttgccttgtctgacgccgacaatgacatcaattccgctttcttttaagttcagcgcgtgtgcatgaccttgtgaaccgtaaccgataatcgctacttttttacctgccaatacgttctctttgatatcaccgttataatatacttttaccattttaatctctcccttttttgtgttatacaattgaaattgttttattggatgacgccttctgctgggttcccctcgcaaaagccgttgtgcccgttctcgcgatttctttaattccgtaaggtttgagaagctctatgagcgcttcgattttattagattcgccggtaacctgaacgacgatgctgtctcttgagacatcaacgacggaagctctgaacggctcaatgattccattgatttccgttctggccgacggtgcggaaacaactttgattaatgccagctcacgctgtacaatcgattggtttgtaatatccgtcactttcaggacgtcaatttgtttgttaagctgctttgtcagctgctctacgtcattttcgccttccacatggacgacaaatgtaatccttgaaacaccgcttgtttccgtgtggcctacagtgatgctttcgatattatagtgtctttttgtaaacaggccggtgatccggtttaatacccccgagcggttgaccaccgttaatgtgataatgcgtttcaaggtttcacccccaccatttcatgaagtcctttacccggcgcgatcatcgggaatactttctcgcttttggcgacccggacgtcaataacggccggttcttttgatgaaagcgcctttttaagctcttcttccgcctcttcttccgatgaaatccgaacgcctttaatgccgtaggcttctgacaatttgacaaagtcaggctgcgccgagaatttggattcagaatagcgttcttcatagaagatttcctgccactgtctgaccatgcccagacattcgttgttcaagataaccactttgacaggaagattcagctgccggatgacatctaattcctgaagggtcatctgaaaaccgccgtctccgaggatggcaacgaccgtggcgttacgatcggccagctgcgctccgatggccgccggaaggccgaagcccattgtgccgagccccccgaggtcacccacttatcagcctttcggaaaggataaaactgagccgcccacatctggtgctggccgacatccgtcgccacaatcgcctcaccgtttgtgaattggtgaatatactcaatcagcttttggggtttcaagccctcttctctgtcgtctgtataccaaagcggatattcttctttccattctgaaagctgctgtttccattcctctgtctgtccctgttttccgttttgcttcaataattcctgaaggacgattttactgtcgccgaccaccggaatctgcgtttcgataatttttccgatttcagcaggatcaatatcgatatgcgctactttggccgattttgcaaaatgcttcagatttccggtcacgcgatcatcgaaccgcgctccgatgctgatcagcaagtcacagtggtaaagcgccatattcgctgtgtatgtgccgtgcatccccgccattcccagaaaaagaggatggtctgccgggaaaccgcccagaccgagaagcgtgtgcgctaccggaatttgctgctgttcggcataattttttaaatcttctgaagctttaccgtgcaaaacacccgctccggctaaaataaccggctttttcgcactgctgacagcttccacgagctttcggatctgcagatagttaggctcttttaccggctgataacccggaagattgatctcgtgatcatatctgaattctccttcaaatgctgcgacatccttcggtatatcaattaataccgggcccggtcttcccgtcgtggcaatatggaacgcctctttaatcacacgggggagatcttccggacggcggacttggtagctgtgtttcgtaatcggcatcgtaattcctaaaatgtcggcttcctggaaagcgtcgctgccgatgaccgaagtggcgacctgaccggtaaacactacgagcggcagtgaatcaatcatcgcatccgcaagaccggtaactaaatttgtcgctccgggtccggaggtagcaatcacaacccccggctttccggagactctcgcatacccttctgccgcatgaatcgcgccttgctcgtggcggggcaggatgtgaaccaatcctgattgatacagtttatcgtaaatcggaaggacggctccccccggatagccgaagatcatctcgacattttctttctttaatgattcaatcagcatcagagccccgttcattgtttttgtacaatcggcagacaaagaatccgcctgtacatttgtgcccattttcagttcctccttttcaatgttcccttctaaaatccaattcataaaacgcagcgccggctgacgcaaataaaaaagccttcccacccacattcagccaagcatttcatgcgatagccaaaaggggcgaaaaggctttgctctccgcggtaccacccttgtttacggtcatatgcagaccgtctcatggataatgattatccgttttgataacgagtaaacattgcgttcactcggccgagtcctactctttacatttcagaccggcactctgaggggagttcactttgatttgttttaccggctctcagcgttaccggctctctgtgaaaaacttcagcaaagctacttatcctcttctgcgctttttattatggcagctcttttattaaaaaagaaccttcatttgtttgttttttcagtgttttatgatttttctttttagtgtgaatcatttatttatttttgtttgaactcatattacgcccgtttgcagacagtgtcaacagcatttttataattattagacaatttagattaatcaatctattttgtatacgctttcattactgatataaaaggatcggcaaatgttaaaagtttttatattttttttattaatctctcaagattacatgaaatttttccgttcatatacgaatatgtcacattttattacgcgatttttctctgtccttccggcatgcttgtcagatattccgttcgattgaacaggctctttatacagacatacgcatacactgttcttatctcgtaagaaatgagtgatgtcatgaataagatgttatcaggcatgcagggcctgcctcctggatttccgcctttaccggtcttaccgccgcagtcttactatcctccggccccgatgcatacagcaccatatcaaggcggcccttcttttcagcagggatttccgccatccggatacggacagcagaccccgcaaagcacactgtcattcgccggacagcaattcgttccgtacccttatacatccgggtactacggccaaaccttcagtgacgtcggcggaagcctcggcgccggggcacatcccggcgcgctcggtggcggtttcagcggccatgccgggggcttcagcgctccgagcggattcagatgatacaaaaaccggtctcacacggccggtttcttttcttattcacagagtataacgttcattccactgattcatttcctgctccgtatagtaatcagcccttgaaacctcaacaatgattaaaccgcattgagtgattaaaaattgtttcagttcctcaaacagctcgtcttttccgcaaaagatcgtttctatattgtgatttttatatgcaaatgcgtacttcaaaagctaattcctcctgctgtctttctatcaatcatcaacaaaacgtatgatagaaatcagataatttatcactcaagggcgccttaagtatctttatacatatatttattacggtaaatattacattaagtttcatttacattaaaattactttacaattttcatcaaatacggaacttttgtttcgtaaaactaaaaataaaatacaaaaaaacctcaaacccattgtcagggcttgaggttttttatacgtcccaggagagattcgaactcccgaccgacggcttagaaggccgttgctctatccggctgagctactgggacatgaaaaacaaatatctgctgattattttaccatgatatcagtgaattgacaatatagtcatccgataaaaaaggccagcggcatcagttttcactctgatgtcaccagctctttttttgtacgtcccaggagagattcgaactcccgaccgacggcttagaaggccgttgctctatccagctgagctactgggacagcttttgctttatgtatcagcgacaagatttattatatacaggttcaaatcataagtcaatattttttaaaaaacttttgatggggaagaatgaaatctcccccatcacttgttaaaaactgattgtattccccaagtccttcaattcccgacccgtttcgtcgtaaaatgtcacggcgccttctctttctgtaagagtaagaatggcatagcttttcacattgcggactctcggaagacggatgctgcccggattaatcaaaagcttgccccgaagcacttcactccccgcaatatgtgaatggccgaagcagacgatatccgccccaagctcttccgcccggtaaaaaacagttaaaagtgactgtttaatgccgtgaagatgcccgtgaacggccagaattttctttgaaccggcatccagaaggagttcatcctgaaacccgccgccaaagtcgcaattgcctttcaccttgtgatacggcgtgagtgccggatgtgcggcgtcaagctctgaatcaccgcaatgaatcatcagatccgcttcgtcttcgtgccgctttgcaatcgtctccagctcgtcttcaaggccgtgactgtcacttattatcagcactttcattgcatacgctcccccttatgaatcaagcagctttgacagtttcttgagcgcctcagccctgtggctgattttgtttttctcagcgcttgtcagctgggccatggttttatctttatcttttacaataaaaatgggatcatagccgaacccgttatctccttcgggtccttctgcaatatacccttcaacatgaccttcgaccgtttttgtttcctgccccggcatgctgacggcaagggcgcagcggaaacgggccgtgcgctgctctttttcgatgccttttaattctgacagcaccttgtccatattcgccttatcatcttttgcttctccggcataacgggctgaataaacgcccggtctgcctccaaggttgtccactgataaaccggagtcgtctgcaatgaccattttgttgacggcttttgccacggcttccgcttttaagatggcgttttcttcaaaggtatgtccggtttcctcaatttcttccgtaaatccgatttccgccaaagaagagacgctgtagcctttcggttcgagtatttccttgaattctttcacttttccctgattgtgtgtcgcaataatgacttctttcacgctgatcaggcctctctttcttatttcagttcaggcaatgtttctcccagcacttctttttgcttttgaataagcgtctggattcctttttcggcaaggcttaacagtccgtttaaatcttcacgggagaatgtggcttcttcgcccgtcccttgaagctctacaaaacgtccgcttcccgtcatgatgatattcatgtcgacttcagccgccgaatcctcttcataattcagatccaaaagaaggccttcttctttatccatcccaacagaaatggccgcgagataatctgtcacgggagaggttttgataacgccgctttttacgagtttgccggtcgcaatggccattgccaagaatgcgccggtaatggaagccgttcttgttccgccgtcagcttgaatgacgtcacagtcgatccagatcgtccgttcgccgagcttctccaaatcaacgacggcccggagcgcgcgcccgatcagccgctgaatttccatcgttctgccggagacctttccttttgaagattctcttatcgttctttgattcgtcgcgcggggaagcatgctgtattccgctgtgatccagccttttcctccgccgcgtaaaaatggcggcacccggtcttccacagatgcattacagatgacctttgtatttcccgctgtaattaaaacagagccttccgggtgagtgataaaatccaaatcaaatgtgatagggcgcagctcatcgtgctgtcttccgtcgtgtctcatattttacctccgattatatgtacataaaccttttgttccggattgtgaataaagaaagaggcagccggaacgctaacctcttttttactagtatatcaaaaatcgcaaattaaaaactacccgtattcacttgtgccggcctcgaaacaggttttgaaagggattctcctttttcattcaccagttctgattttccgtttacttttatagaaacacttttaatcgacggctgttcggttaacgtgagaacgatgctgtccagtacgcccgatgacaccatttttgttttttcgtcggcgcttccgtaaatagagctgttaaagtccagtgtaacctggccgtctttcactttcggcttgctgagaagcttaacatcgttattaaagtccgtcaaaagcccgcttgctttgcccggtccgtcggtgagctgttcaacggcagcggtgatgtcatttgtttccgaattgtcaatccgctttgtaacaggcacgtagtattcgcttgtctctgtttccgccagataatatacagtcagcggatgggtgtctgtcagatcattcactccggccgtttcaatattaatcccgtcttttctgcttaagtcgcccgtaatcggcgtgccgcccacaggcatttctttcagttcgtgcccgttgattctgattttgactttatctattgagctgaattgggtaagcgtccacgtaatcgattgcaggattttttgttcgtcttcttttttatagtttttaaattccttcgaaaaatcagcgactgcagtgccgtcttttttaatatcgacatttaccgtcgtatccgcagggagcaccgctctgaagccgttcggcaggatttctgatacaggccctccctgaaccaagtactcaagggcctgctttgcggttccctcactgttcggaagaggcagtgtctgtgctgcgacatagccgtttttatcaatcagatacagttctcgcatgactgtattggccggctggtcggctttagaagtgccgtttttctctgactgctttggttttgcctgaattcccgcttcatcctttacatatgaaatgtcttgaggcgggtcaatttccccggctgttttatcggattgaaacaaaccgcatccagataacacaaaagccgaagtaagacatgttgcagcaatgactgcaggtccttttttcagcatacttttccctcctaaggctgtttgtactatgatgtatacgagccctgtccgggaaatagaccgggaagcgcaaaaaaacccgctgtaaacagcggggtttttttgatttattttctgaccggctcttgaagggagatgcactcgacatggccgatttcgtggccgaaccagtcttcggcaatttttgcgaagccgttccgctctcccgttgtaagaaattgatgctccggtgcatgtttcgattggtttaacaaacctttataagacaagatggtgctcacttctctcgccgtctcgtctccggaggaaatgattttcacatgctctcccatataattctgaatcgggtcttttaagatcggataatgcgtacatcctaaaatcaaggtgtcaattgatgtaccttttaaaggttcaagcgatgcttcaaccgcttcctccgctgattcctgaagaaaccgtccgctttccacaaacggcacgagcagcggacaagccgtgttctcaacttgaagttctgcgtttaacccgagcagcgcctgctcatacgctctgcttttaatggtattgaccgtgccgatgacgccgatatgctggtttttcgtgacctttatcgccgttctcgcacccggctgaatgacgccgacaaccggaatatccgttttgcgctgaatatcctccaaggcaatggccgtggccgtattacaggcgatcacgagcattttgatatggtggttttccagcaggtaatcggtcatttcccacgtgtattgaagaacttcttcttcaggacgcgggccgtacgggcagcgttttgtatctcccacatagatgatattttccttcggtagctgtctcatgatttccttagcaacggttaacccgccaaccccggaatcaatgactcctatcggctgttccaacaaaatcgcctcattttcttttcatttcatgctgcagtttcaataatgatttttcgaaagcggctgtttcttcttcggaaaatgtcgcaaacatatcccgcaaataagcctgtcttttcaaaatcacttcttggataatgcgctctccttcagcgagaagatgaattctgacgacccgtctgtcagccgggtctttgacccgctcgacaagcttatttttttccatgcggtctatcagatccgtcgtcgtgctgcaagccaaatacattttgcctgataattcgcctattgtcatatcccccaattcataaagccattgaagccccacgaattgcggcggtgtaattgcatattggttaaggatttctcttcctttttgtttaatgatcgcagcgatatggcggagtgatttttcgatatccgcaacatgctctacagattttgatgtcatttgtccatccctcactcaaggatctttctgggctatgcgctccgtgtctattttccttctttttttaagaaaatgcaagactgacggagaaaaaggaaaaaccgggattttcaccgcatgcccatcagcccgggcgccaacgcaaataaccggctccttctcgtaaagaaggaaaaccggcaagaatcagagctctagctcacccattctaagaagctcgacaacagcttgcgaacgccctttcacacctaacttctgcatggcatttgaaatgtgattccgtacagttttttcactgataaatagctcgcttgcaatttcctttgttgtcttgtcttgaacgagcaattcgaatacttctctttctcttttggtcagcagcggctttgattgaaaatctttctccttcaagtattgtaaccctccttgctaaggtgagagcgaatctgaaacgaatgggtttatatagtcaagatatcatatgtaaagggcgcttcggaggtgacgtctcttagagaaatagttatccgttcaggcgagcagaatgcctttctcccgctccgtccagctgaccgctttgccgctttttttcgacacttgaaccataacgacggaacctgtaaagcacggcaggcccgactcattttctccaaggtaatgaagggtgacggacgcatttccggcagcgcttgctttcacataaatccgcagattttcatacggcatcacctgacgcatatagtcgcactgctggcttgcgacgaccgtcatcgtttccgagttttgcgccgtcatgccccgctgtttaaaataagcgatccgtgcttcttcaaaatagatgaaaggggttacattattcatatggccgaacatatccgtttctgaaaaacgaaccgatacttcagtaaagaaagaaaacgactgtctccattcttcaaacgggatatcaatatattgcggttgtttcatcaccttcagctccttataaaaaaacctctcccgtgcggaagaggctctttttctctttcttatactctgtcgcttccgaagaaattacggaatgcttgtaaattggtatctctgttcaaagcagcgattgaagtcgtaagcggaatgcctttcgggcaggattgaacacagttttgtgaattcccgcaatctccgaggccgccgtctgtcattaaagcttctaaacgttctgctttgttcatcgcgcccgtcggatgggcattaaacagacgcacttgtgacatcggggcaggccccatgaatttcgacttgctgttgacgttcgggcaggcttcaaggcagacgccgcatgtcatgcatttagacaattcatatgcccactggcggcgtttttccggcattctcggccccggccccaaatcgtaagttccgtcaatcggcacccatgctttcacttttttcagtgaatcaaacattctgctgcggtcaacctgaaggtcacggacaaccgggaatgttttcatcggcttcagacggatcggctgttccagcttatcaatcagcgccgtacacgactggcgcggtcttccgttgatgaccatggagcaggcgccgcatacttcttcaagacagttcatgtcccatgcgaccggagtggttttctctccttttgcattcacgggatttctgcggatttccatcagggcggaaatcacgttcagattcgggcggtaattgatttcgaattcttcatcgtatggcgcgctttcgggcgtatcctggcgtgtaatgataaaccgtatctttttctcactcatgattatttcgccaccttcttcttcgagtagtcgcgtttacggggcgcaatcagtgatacatcgacatcctgatattcaaattccggagcttcaaacggaccggcatgtttagccatcgtcgttttgagccactcatcgtcatttctttcagggaaatccggtttatagtgcgctccccggctttcatttcggttatatgcgccgagcgtgatgactctggcaagctgaagcatattggagaactggcgggtgaacatcgccccttggttgctccattttgtcgtatcgttgatattgattttcttaaagcgttccatcagctcttggattttgtcatccgttttcaaaagcttgtcgttgtggcggaccaccgtgacgttggccgtcatccattctccgagctcacggtgaagcacgtaggcattttcatcgccgtccatcttcatgatatcggcccatttttcttcttcttttttcacataggaatcaaataatgaagaagacaggtcttccgctgatgtttcaagtccggaaacatatttcaccgcattcggtccggccaccattcctccgtagatggcggaaagcagagagttcgcccctaaacggtttcctccgtgcattgaataatcacattcacccgctgcgaacagtccgcggatgcttgtcatctgatcataatcaacccacagtccgcccatcgaatagtgaacggcagggaaaattttcatcggaagcttgcgcgggtcatcgcccatgaatttttcatagatttcgataatgccgccaagcttaacgtcaagctctttcggatctttgtgcgacagatcgagatacaccatgttttctccgttgatgccgagtttctgattcacgcacacgtcaaagatttcacgtgtcgcaatatcccgcggcacgaggtttccgtaagccggatatttttcctcgaggaagtaccaaggttttccgtctttgtacgtccagactctaccgccctcgccgcgcgccgattcactcatcagacgcagtttatcgtcccccgggattgctgtcgggtgaatttggataaattcgccgtttgcataataagcgccctgctgatagacgattgatgcggcagatcccgtattgatcatgctgtttgttgattttccgaatacgattccgggtcctcccgtcgccataataacggcgtcagaacggaatgactcgatttgcatattggtcagattttgggctacgataccgcggcacgtgcgctcatcgtcaagaacggcgccgaggaattcccagccttcgtattttgtgacgagacccgccacttcatatctgcgcacctgctcgtccagtgcgtaaagaagctgctgacccgtcgtcgctcccgcgtaagcggttctgtgatgctgtgtacccccgaaacggcggaagtccaagagcccttccggcgttctgttaaacataacccccatgcggtccaataagtggataatggacggcgccgcttcacacatcgcttttacaggaggctggtttgccaaaaagtcgcctccgtataccgtgtcatcaaaatgctcaaacggagagtctccttccccttttgtgttgacagctccgtttatcccgccctgcgcgcagaccgagtgagagcgtttgaccggaacgatggaaaacaatttaacggccgtgcctgattccgctgctttaattgtcgccatgaggccggctagacccccgccgactacgataatgcttgattgactcatgatagcccctctccctctagtaatctagttctcttacacaaacgcaaaaatcgcttttaaacctacgtatgaaagcgctaaaaatataatcagcgtcacgtaagtcgaaattctttgagaacgcggcgtaaccgtgatcccccatgtgaccgcaaaagaccataagccgtttgaaaagtggaaaatgaccgataaaacgcctacaatgtaaaaaccgagcataaacggcgagctcagaatattcgccatcatatcgaagttgacttcagcgcccatctgcgcggcaatccgcgtctgccacacatgccagctgacgaaaataagggtgagaataccagtgacacgctgaagcacaaacatccagtttctgaaataactgtagtggccagcgttgtttttcgcagtaaatgctatgtacacaccgtaaaccgcatgataaattaaaggtaagaaaataataaaaatttctaacgcatacctgaacggcagactgtccataaagccggccgccttgttaaacgcatccgctccccttgcggcaaattggttgacgactaaatgctggatcaaaaagatgccgaccggaataacaccgagcaaggaatgcaatcttcgaaaataaaactctctgttcccagacattactttaccccctgtttgatttaagtgcgaaatgtactaaaatctctgcccccacttcgtttcaattgtaagcactttattaaaatttattgacaatttcattttactcctccctcaaaagggcgtcaagaaaacgtgtacataaattataattttcggaattgattatctggagggaaaattttattttcctgcgatatctttctcacattttttcgcgtgttttataggatcatcctgtaatcctcccccctgtttaagctataataaacgaaggagagaggggaatacataatatgaagaataattatgaagcagctttagaacctttaactgaactcgacgtcagcgcatacggctacgaattaatccgggaaatcgtgcttccggatatcctcggtccggatcattcatcgatgatgtattgggcgggaaaacgcctcgcccgcaaatttcctcttcaatcgtgggaagaaatccccgccttttttgaaaaagccggctggggaactttgacaaacgcaggatcgaaaaaacaagaactggaatttgaactggaaggaccgctcgtatccagcaggctcaaacatcagaaagagccttgtttccagcttgaagccggttttatagccgaacagattcaattgatgaacgatcagattgcagaatcttatgaacaggtaaaaaagagagcggataaagtcgtcctgactgtaaaatgggatatgaaggaccctgtataattgaaaaaggcggtgactcaaaagtcccgcctttttgcctgcccgtttatacggcagacggctgtttagacagctcaaacgcatcatgaagcgcttcgaccgctttcaccatatcattttcgctgacaaccgctgatacttttatttcggatgtgcttaccattttgacttgtacatttttttccgccagtacggcaaacatgtccgcggcgacgccgggatttgaaaccatgcccgacccgacaatggagactttcgccagttttctttcggtttcaattttttcatagttaagcgcgtttttatattcttcaagcacggcgaccgtttgggcggcatcttccgttttcactgagaaagaaatatccgcttccccatcatccgactgtgtctgaataatgatgtcaacgttgatgtttcgttttgccagcgcggtgaagattgttgaaagtgttgtcagtccgcttgcaaggcccgtgacggacacccttgtgatctggtcttcaaatgcaattcctctgacgattaaattctgctccattgatgattcctcctcaattaatgttccggcttcatgttccgtgcttgaccgcacttctaaaggcacttggtagtttttcgcgaactcaaccgcccgcgggtgaagaacacccgctccgagatttgcaagttccagcatttcatcataagaaatccccgccagttttctcgctgaccggacataccgcggatctgtcgtaaatacgcccggaacatctgtataaatgtcgcatttatccgcttccagcgctgctgcaagagcgaccgccgtggtatcagaaccgccccgtccgagcgtcgtgatgccgccgtcttccgttacgccctgaaaaccggcaacgactgtaattttgccttctgcaagctgcgaacgaatcgccgtgatatcaatatccgtaattctcgcattgccgtgaacggcttccgtgcggacacccgcctgccagcccgtataagagacggcgtcatatcctttttcctgaagcgccatggccaaaagcgaaatcgtgacctgctcccccgtagacaaaagcatatccatctcgcgtctgcttggttcagatgtgatttcagccgcgaggttaacgagcgcgtcggttgattttcccattgccgaaacgacgactacgacatcatggcctttttgcttttcagcaatggcgcgatttgcggcattttgaattttttcggcagagccgacggaagtgcctccgaatttttgtacgataagacccatactagaccaccctttacattttggttcgtgcgggtgaggagaaaagagcgttttgtccacaataaaaaaagcaatgagaggaatagctctcattgcttttcatatcagtacgattgattatgaacaacgagatagccctccaagaaaatgaattcttgacagccttacatttatttaatgcaaggccagcaaatcacaccgatgggatgtgacacacttcggcgacgctcccctttcagcctttttcgcagaatccatcattctccaaaggcttactattgaagttcgcacctctatcttcaccatataacacgatcttatgaaattagttcacattctagcagatttttcagaaaagcacaatactatttttttaatttttcaaacagcaactgggccgccgcggccggcacaccggcttttttgatatcgtcaaggcttgcttccttcatctttttgacagatccgaaatgttttaagagcatttttttgcgtttttcgccgattccggggatatcatccagaacggattgaaagacgctttttccccggatctgtctgtgaaagctgatcgcaaaacggtgaacttcgtcctgaatgcgctgaagcaggtaaaactcttggctgttccgctccagaaacaccggttcaagcgggtcgccgatcaaaaggttcgatgtccggtgtttatcatctttcgccagtcccgctaccgggacatcaaggccgagctcattctcgagcacgtcgcgcgccgcgttaatctgcccttttccgccgtcaatgatgattaaatccggcagcggaagattttcgcggagcaccctcgtgtatcttcttctgacgacttccctcattgagccgtaatcgtccggccctgttacggttttaattttatatttgcgatattcctttttattcggttttccgtcaataaagacaatcatggccgatacggggtttgtgccttgaatattggagttgtcaaacgcttcaatccgatgcggcgtgtaaatattcagtgcttcgccgagccgttcggctgcaccgattgaccgttcctcatcccgctcgattaacgagaatttttcccgcagggcgattttcgcatttttgtgcgcaagcaaaagcagctcttttttcggaccttttttcggctgatgcacggcggtttccaacagctcgccaatcatgtccctgtcaacgctgtcaggcaccagaatttccttaggcagaaagtgattgtttttggaatagaactggccgatgaaggtcagaaactcttcatccgcttcctgatacatcggaaacatgctgacatcgcgttcgatcagttttccttggcgtataaaaaagacttgaacgcacatccagcctttatcgtaggcatatgcaaacacatcgcggtccagaaggtcattcatggtcattttctgcttctccatcgtcgattcgatgtgagcaagctggtcgcggaattctttagcccgttcaaattcaagcttttcggccgcttctgccattttcgcttcaagctcttttttgatttcgttatgccctccctttaaaaaacgggtgatgtcttcaacaatctcgcggtttgtctcctcagatatatcctttacacatggggcgaggcattggccgagatgataataaagacagacgcggtccggaagctttgagcatttcctgagcgggtaaaggcggtccagcagttttttcgtttcccgcgccgcctgcacattcggatacgggccgaaatagcgtcccttgtcttttttgacattccgggtgacaatcagccgaggatgacgttcatgggtgattttaataaagggataggttttatcatctttcagcatgacattgtatttcggatcgtattttttaatcagattcatttccaaaataagcgcttcaagattggaggaagtcacgatatattcaaagtcctcaatctccgtcaccagccgttgggttttcgcgtcgtgagaaccggtgaaataagaccgcaccctgtttttcaagactttcgctttccccacgtagatgactgttttctgacggtctttcattaaataacagcccggctgatcgggaaggagggccagcttttctttcagttgtttatccatacgttacccttccttacattcatttctcgtgtccattcagtgtatcacgaacatttgtttttctccattctcagcttttggaagatcaaaaaaaggcgacccctttcaaaggaatcgccctgccgtaacggaagctttcggcttacagatgtttgtttacaagctcttcaagagcttctttcggtttgaagccgacagatgtttcaacgacttctccgtcttttagcacgagaagtgtcgggatgctcatgacgccgtatttaccggcagtttcttggttttcatccacgtcgattttgacgattttcagtttgtctcccatttcttgatcaagctcttcaagaacgggcgcgatcattttacaaggtccgcaccaaggagcccagaaatcagccaatacgacaccttcacttgtttcagctgagaacgattgatcagttgcttttacgatagccatttgttattcctccaattgtcaaatgatgatttttagtatagcatctcccattcgttcatgctaatttaatgcttatattattttcccccgaacccgccggaaataatcttatttatacagtgtattataaccgggcggcgggcgttcaaaacttaagatggacctgcaggcagcgtgattaatacaatcgccatcggaggaagctccgcctcaagttttcctcccttttgagcaaacccggaaaacggcttcggtttgacgttttccggactgctgaatgtattgtgggcattcattttttccgcgtgcagaatcgttcccgaaggcgtccctgtctttttcatgccccgcagttcaatcttcacgtcagctttgtgcagatgatcgatattgcaaatgctgatatgtatgtctccgttctgctgtttggacgctgaaatgctgacttgcgggagccggccgtcattccattcgtacccggctgcatttgtttctgccgccaaaagagatgcgtcctggtgcaccttaaacatatcgaacacatgatacgtcggcgtcaacagcatttctttcccttctgtcaggatcattgcctgaagcacgttgacggtttgcgcgatattggccatctgtacgcggtctgcgtgctgatgaaaaatgtgaaaatgcgcggcggcgacaagggcgtcgcggatcgtattctgctgatacagaaagcccggatttgtgcccggctcaggatcaagccacgtgccccattcatcaatgatcagcccgactcttttttcgggatcgtactgatccatgatggcgctgtgccttgtgatcaattcatccatatgcgccgcttttttcatcgtgatgaaccattcatcttccgtaaactccgtcgctgatcctttccccttccagaagtcgcccggtattgtgtaataatgcaggctcagtccgtctatgagatccgcggcttttttcattaaagtttcagtccagcggtaatcgtcgacattcgcgccgccggcaattttatagatttcattaccgctgtaattacggacataggtttggaagtttctgtaaaggccagcataatactcaggatgcatgtttccgccgcagccccagttctcatttcctattccgaaatatttcagcttccacggtttttcccgcccgttttcttttctccagtcggacatcggcgtgcccgcttcaaacgtcatgtattcaatccaatcagccatttctttaaccgttccgctgccgacgttaccggcgatgtacggttcgcatccgagcagttcacaaagcatcataaactcgtgcgtgccgaattcattagaatcaatcgtcccgccccaatgggtattcagcattgttttgcgtttccctacgccgtttgcccaatggtattcatcagcaaaacagccgcccggccatctgaggacgggaatctgaagctgcttgagggcggcggcgacatccgtcctgacccctccggtattcggaatatcggaatcttttccgacccagatgccctcatatatgcctcttcccaggtgttccgcgaaatgtccgtatatgtttttattaatggttccccgtgtgatatcagtttgaatgactgccgtattgtgagacaaacttgatcattccttccccttaataagaatgaaagcactacagccgatctatctgggatgtatgctgtatggataagtttgtaagcgctttacaaaagcttattacattggttcgtacatgtcaatctgttgttttattaatctataatttgtacgaactaattaacacaaaccaaaaccctctgacaaataagccagagggttttgattatgaatgaatattggcatttttaaattcctgagtcagaagcggaaccacttcgaacaaatcgccgacaattccgtagtccgctattttaaatatttccgcttccgggtctttgttaatggcaacgatgaccttactgtttgacatgcccgccaaatgctgaatcgctccggaaattccgcaggcgatatacaaatccggcgtgacgacttttcccgtctggccgatttgaagagaatagtcgcagtagtccgcgtcacatgcgccgcgcgaagcgcccaccgctgctccgagcacctcggcaagttcttttaacggttcaaatccatctttgctttttacaccgcggccgcctgctacgataattttcgcttctgataaatccacgccgtccgccgtttttttgactacttcttcaatgaccgtccgcaaatctgccggaggcgccgcaagctcttcaatatcacccgtccggttcgcgtctttttctaatgcctgaatattattcggacgaattgtcgccagaatgaaaggatcggttgaaatcacctgttcaaaggctttgccggaatagatcggtcttgtaaaaacgatgttatctccggtaacgcttacatctgtgctgtctgaaatcagccccgtttcaaaccgggccgcaagcttaggtgacaaatcttttcccatagaagtgtggccgaaaatgaccgcatcaggcttttcattttcgatcaaatccccgagaattgcggcatatccgtccgccgtatactgagaaagccccggcgaatcggccgtaaatactttgtcggcgccgtactgaatgagttctgatgctgcatcagccgcgccctttcccatcagcacgccgatgacatctcctccgccggaaatggttttgcctgcggctatggcttcaaaggtgacgttccgtaaggcgccgtcacgaatttctccgagtacgatcactttttttcccattctgacatcccccagtttctttaatatcagtttatacgactttggcttcttttctcagcagtgatacaagctccttcgcctgctcagaggcttctccttcgatcagtctgcccgcttctttttgcggcggcagaaaacgttcgatcgttttgagcttcggtgcggcatcatcttcatcaatgccgagatcatcgagctcaagttcttccagcggttttttcttcgccttcataatgcccggaagcgacggatagcgcggctcgtttaagccttgctgtgccgtgatgactaaaggaagtgaggttttaatgatttcggtatccccttcgttgtctttctctgccgcagcttcatcgccgctgattgtcagttttgtaatcgttgtgacgcaaggaatgttcagcagttcggcaagccttggagccacttggccggaaccgccgtcaatcgcgacatttccgccgagaatcagatcatattcccggtccttgaaataatgatataagatagttgaaacggagtattggtcaggatcgctcagatcatcttcaatattgattaacaccgcctggtcacagcccatcgcaagggcggttctcagttctttctccgcatcttctccgccgacggttacggcggtcacggttccgccgtgctcttccttcagctgaatggcttcttcaatggcgtattcatcatacggattaatgataaattcggccccgtcctcctgaatctttcctgcttcaatgacgattttctcttctgtgtcaaacgtccgtttcatcagtacaaatagattcatattcttatcccctttatcttcgcccaccgaattgaggctttcttttttcgagaaatgcctgaatgccttcttttgcgtcatctgatgcaaatgcttccccaaagcgctttgcttcaagctttaagccgccgtcataagaatagaccttgtttgaataaaggagctcaagcagaaaagccatcgactgcgggcttttttccgcaaacttgcccgcgagcgttttcgctttttgcagcagctcttcctcatgttcggcgcctatcgtgacaagaccgaggctgagcgcttcttctccggttacaggttctgaagtgccgatcatttcaagcgctttcgccgtaccgacgtaccggggaagccgctgcgtcccggcaaagcccggaataatgccgagattcagctcgggcaggccgagctttgcatctaatgtagcgattctgatatggcaggccatggcaagctcaaggccgccgccgagcgcagcgccgtgaatcgctgcgataacgggcttcggaaacccttcaattctttccatcagctgctggcctttatccgccatggcagaagattgctcaagattttcaagcgacgtaaattcctttatatcagcgcccgccgagaaaaatttcccctctccgcgaatgatgatgcttctgacactgtcatctgtttcacagcggtcgaacagaccggacaactcatctaaaaccgcgccggacagcgcgtttgccggctgatgattaatggtgatcaccgcaacagattgttctaccgccatcgaaaggctgttcatccgtcaaccccctttagttttgatgaatccctgacaccaacagctccaataccttgtctgacaaatccggaagatcatatttctgatcgttcatcacccatgttgtcactgtttcatctatcgtcccgaatatcatctgccgggcgaggcggacgtcgagattatctttccattcgcccgactcgattccttcggtcaaaatggtgtccagcatgtttaaataaccttttaaaatatcattgattttcagacgcagcttgatattcgactgtctgagctcaagctgggtcacaatcgcgaggtggcggtcattgccgagcagtgtgaaatgctgcttaataacgagagcgagtttttcttttgccgtcgttttttctttcacttcttcttccatgcgttcaatgaactggcccatcttttctttaaaaagagaaatgagtatatcctctttgtttttgaaatataaatagatggtgccgtccgcaacgccggcctgcttggcgattttggacacctgtgattggtgatagccgttttccgctatgacttctactgctgcatcaataatctgcatatactttggccgtttttggttcaatgtcatcgttccttccttcgataaatgaatgactattcattcataacttcatgataaaaaggaatccggattttgtcaagtttttcttttaaggcaccttgttttcatgggaagcatcttcctcttcgactaaacgccttcttaatatttttccgacggccgttttcggaagctcttttctgaattcgtacagcttcgggactttgtacggcgcaagccgctctcttgcaaacgcatcaagctcatcggcatctgcctcggcgccttttttcaaaacgataaatgctttcaccgtttcccctctgtaggaatcagggacgcccgctaccacgatttcctgaacggcttcatgctcataaagcgcctcctccacctcgcgggggtaaatgttgtatccgccggcaatgatgatgtcttttttcctgtcggcgatgtagaaaaatccttcctcatccatatatcccatatctccggtaaacagccagccgtctctgatgacacgcgccgtctcctcctgcttattccaatagcctttcatgacctgagggccttttacgatcagctcgccgtgttcatacggctccgcaagcccgcctttttcttctgaatagattcccgcatcggtattgggccagggacagccgatgctgccgggtttattttttccccagatgaagtttgaatgggtaaccggtgatgcttcggataatccgtagccttccacaagctttcctccggtcactttttcaaatttctgtttgacctcaaccggcagtgccgctgaaccgctcggacagctttcaatggaggacagatcatacttattcagctccgggtgatgcagcagcccgatgtaaatcgtcggcgccccggggaaaaccgtcggcttcaacctgtcgattgttttcagtgtatccaaaggattgaatttaggaagaaggatcatttcacatccctgcataatggaaaaattgagcacggcggtcaatccgtacacatgaaaaaaaggcacgatgccgagcaccttttcggctccctttttcattttgtacatccaggcggcgcacatttctgtattggcctgaatgtttcggtgtgtgagcatgacgcctttcggatagccggttgttccgcccgtgtattgaagcacggcgatgtcatgcgcagggtcaatatcaaatggctctgcttcctctgctttttcgttttttaaaatatccgctaatttgtgaatttgttcgcagccgtcataatcaatatgcacctgttgcttttgcgtgagcgtataaagcatatttttcggaaacggcaaaaagtcttttatacttgttgtaataatgcgttcgacgagtgataacgttttcatttttatcactttcggaaacagcatatcgagggtgatgatcacgcgcggcgcactgtctttcagctgatactcaagctcgtgttccgtgtagagaggattggtctgaacgacaatgccgccggcaaacaatacgccgtaaaaagcgatgaccgactgcggacaattgggcagcataatggcggctctgtcaccttttttcaggcctgttttgcgtaaaaaagcggcaagctttaatgaatctgtgagaacgtcttggaatgtgagtttttttcctagaaaataaatggcggtatggttcgggaattgagctgcggagtttgtcagattggatggcagggtttgatcggtaaattcaagctcatgcggaatctcttcgggatattgagaaagccatggcttttcagactgcataatacctctcccttctgttttcctatacgctattattatagcagaagggtgattggaatgggaaagcgtttcatgggaaatttcgagtttcaggaggtgttgagttttctggaaacgctgcattttgaagggggagttcctatcctgcgccagctgccgaagccgattacgtcggccgcctttttgctccatccctttgtccggatgccagatggtcgggaagagcaaaagcgcaaacggccttatgaacatatgtatccgagtgatgaggagatcatcgcgatgggcagacccgtttcctggcaaaccgtcatgagcatttgcggcctgcgttctgaaaaagaaacggcgcttgcgcttatgactgctgtcacggcattgcgggaggaatatgcacatcctgaatccgccgagcggttaaatcggctccatcatcccgatctgtacttgccgagcgatgatgtcacttcgccatttttgattccgggacttttggatgtgttccgttcaaaaggcataaagcgctgcacttattatgagcctgtcgaagagaaaggcctattttcactcaatcaaacggcggcttcggatgtatgcggactgctgcgggctgacatgatcattgccgatgaaaaaacggcgcgccgcttttatgagcatatatgattcttttacgacactctttctcatggaagaacaagacattcagtctgtcgtccgcgccatgaattgggaagccgtcatttgctctgatacggcctgcataaactggtattctcaataaaaaaggccgccgatttgagttcggcagccttttttcagtattaagatgtcatgaccagataaataagtccgatgaacagaaaaatccccgctgccgacagcagcactttcgcaagcttctccatttttccccgtccccttaaatcccggcggccaccacaaatgacaggccgactgagatgacaaatgaaataaagccgacagctctgttatctttttcaatttctttatcaattttaaaccggggcgtcagaaattcaaagataaaatagctgattaaaagcataataaatccgtatacgccccagccgatcatttgcaaaagcgaattatgctgggcgatgctgtgctgaaagacatttgcgataccgagaattttccctccggtcgccattgccaccgcaagattgcctttttggatttccacccagtttttataggatgtcaccaattcaaacacggtcagaaaaatgacgagacacaagacggcaacactgtaataagccgcgatttcaacaagctcattttcccaaaaagcattcatgacgttttctccctttttattttagttcgacaatcgttacgcctgatcctccttctcccgcttccccgaaccgcgagcttttcacgctgcggtggtttttcagaagatcctgcaccccttttcggagggcgcccgtgccttttccgtgaatgatggacactctcggatagccggcgagcaccgcgtcatctaaatatttttcgacgcggctgagggcgttttcgtaacgctctcccctgaggtcaagttcaagggatacgtgataatccttcccttttacggcggtgattgctttttcttttttcggttcaggagccgatttgagaaactcaagatctttttccttcaccttcattttaaggatgccgatttggacgttccattctttctcgccggttttttcaagcagcgcccctttttgtccgaatgtgagcacctttacttcgtcgcccggcttcagctcgcgttttttctctgtttttctttccggctgctttgatttttcaaaagccggcatcgcgtctccgagacgttttttggcgtcaatcagctcgtgttccttaaaggatctgtgttcttgcttgatggacctgagctcgcggataatctgttcggcttcatttgcggcggcttccagtttttccgcagctttccgctcggcttcttccatcattttatctttttgggcattcagctcaatgatttgctgctgaagctctttgtgcagtttttctgcttcttttctgagtgattcggtttcagaaagttcttcatccgctctttttttgcttttttcaagcgatgcgatcatcagatcgacttcgttatgttcggcggtcatttctgacttcgcctggccgatgatatgctccggaagcccaaggcgtcttgagatttcaaatgcgttgcttcggcccggcactccgatcagaagtttataggtaggcgaaagcgtttcaatgtcaaattcaacgctggcattcatgacgccttgtctgttatatccgtatgctttcagttccggataatgggttgtcgcaagcactctggcgtttgtccggtgaacttcgtcaaggatgctcatggcaagcgccgccccttcctgcggatctgttccggcaccgagttcgtcaaacagcacaagactgttttcagacacgtcttttaaaatattgacgatattgaccatgtgagatgagaacgtactcagactttgttcgatcgactgttcatcgccgatatcggcaaacacattgtcaaatacggctgcttccgagccctcgtcagccggtatgtgcaatcctgcctgcgccattatcgtcagcagcccgagtgtttttaacgtaacggttttaccgcccgtattcggtcccgtgatgacgatcgttgaataatctccgcccagttcaatatcgttggccacgacttgatcttggggcagcagcggatggcgcgcttttttcagacggataaagccgtctccgttcatgaatggttttgtcgccttcattgcttttgcgtatctcgccttggcgaaaatgaaatccagtgtctgcagcacttccacattttgagcgatttcttgtgtgtgttcagccgtatgctccgtcagcatccggagaatccgttcgatttcctgtttttcttttactttcgcctgctgaagcgagttgttcatatctacgatcgcctgcggttcaataaacagtgtagcaccggatgaagatgtatcgtggacaattccgccgtagcttgatctgtattcctgtttgaccgggatgacaaagcggtcattccgaatcgtaacgatggtgtcagacagcattttagaagcggaagatgaacgcagcatcgattcaagccggtctctgactcttgattcaagcgtcctgagctgcgtgcggattccccttaaagcgggagacgcatgatcaagcacttcaccatggtcatcaatgcaggagttaatctccctttccaaatcgcctaatgtaatcagctcttctgcatgggcctgtatcagcggtatgccgacgccgtcttctgtcatttggctgataaaatgcttcatttgtttaacggcatacagcagcccggacaattcggtgaattccgccggcgtcagcacactgccgatttccgcccgccgtaaagcggatcttatgtcggtcaggccgccgaacggagcatggcctcgcaagcgcatgaccgcggatgcttcttcgacttcatccagctgtttttggatgtcggcgagatccgtcaaaggtttcagctgcagaagcttctccctgccgagcgatgaggcggcatgtgcggtaatctgttcttttactttatgaaattcaagtgatgataacactttttgctgcacggttttatggtcctccttacttaatcattgcgcgtcagaaatgctttgacctcatgtaacggccgggcgtttaacacatgttttgtctctgtccagcctttgcgcgcagcggtcacgcccgttttcatatcatcgagcatctcgatattatgggcatcggtattaatgaccaaagtcacacctttttcatttgctttgatcagatgctcagtccgtaaatcgaggcgcgcggggtttgcattcagttcaagcgccgtatttgttttggctgcgagctcaatcagcatgtcgatgtcgacttcatagccggcccgtctgccgatcaggcgtcccgtcgggtgggcgataatgtccacgtgcttattcgtcagcgcctgttcaagccgtttcataatgacatgctccggctggctgaagcttgaatgaatagatgcgatgacaagatccatttcagacagaacgctgtcatcataatcaagcgaaccgtcggggagaatgtccatttctacgcctttaaaaatatgaaaattttcaaattcagcgtttaacgcgtcaatttcttccgcctgttttctgagccgttcggccgttaacccgttggctacctttaaatattgggaatggtcggtgatcgccatgtactggtagccttttgccatacacgcttctgccatttctctgatggaaaaagcgccgtcactccaggctgagtgcatgtggagatcgccttttatcgctttatgctccacaaggtccgtttcttcccggtacgtgtcgacctcctgcccgctttctctgagctcaggaggaataaacggcagaccgaagtgggcgtaaaacgcttcttcgctcgggaatgttttgacgtctcccgtttctatggtttctactccgtattcactgatccgttcaccgcgctctttcgccagctgacgcattttaatgttgtgatctttagaaccggtaaaatgatgcagtgtggtggcaaactgttcctctgtcacaagccggaaatccacactcgtctcgtattcaaaggtcaggataaccgatacttttgtatccccgcccgctatcacgtcttttacgttcgggagggaaagaagctgttctctgacagcctccggacgatctgtagcgataatgtaatccagatcttttacggtttcccgcgctcttctgagactgccggcccgggaatatttctgaatatccgtcagccgggccaaatgttcttcaatgactgaagcaatgctgagcgcatagccgatcggaaaccgttccggctgttttccggcttctccgagagcctgaaggattttctcctccgtttttttgccgaaaccggcgagcccctgtactttttgctgctcgcatgcttctttcagcgattccgcgtcatgaacgccaagctcctggtacagcttggcgatttttttgccgccgaggcccggaagcttcaaaagaggaaccaagccttccgggacttctttctgcaattggagaagcgtgccggacacaccttcctgcatatattcacgaatgacgccgtaggtgccttttccgattccggataaagacatcatgtcgtcgatttccgacaggctgcggtcatcctgctcaagcgccgccgccgcttttcggaaggctgatattttaaacgggttgtcccctttcagttccatatagaccgcaatcgtttcaagcagcctgatgatatcttttttatgcatactgttaacccccagtcgtttcctgcttttcatcatacaaatttttctcttccggcacaactgacgcagagcttgaaaaaaacttctccggtcaagagaagttttttatgccccgtactgggcccacagttcttgcaggagccccgacagatacggcgtatgatgtgtgatgatatttgcaagcgtcgattgtgcgagcatatcctgaagcacgcttaccggcagtacggatgcgacgtataacaggataaacgcaaataaatagacttccagaaatccaagcaccccgcccagcagtttgttgatctgtttaatgaccggaatgccggcgatgatattaagcgccgctccgataatccggagcaggatctttgcgatgataaacaaaatgacaaacgcgatcgcgttgtaataagccgtctccacgtttcctttaataaaagacagagccgcctgcccgccggaaaaatcaggggcgggtataaagctcagatgcggggccaggtttttgtaaaaaagcgccgcaaacgcaatcgagaggatgaaactcgtcaagtatataaattggaggataaatcctctttttaatccaagcaatgtgcccattaagagcagaactaagatgatgatatctatcatatggtgttcattccttttctttaagctgccgctccagtatttcatatttttcttgcagtttcatataatcatgcacgacattgaccgcagtcaatacagcgagcttatttatatcaagatatggatttttctcgttgatttctctcattttatcatcaaccattccggccacatggcgcatgtgcgctttgctttcttccccgataatggtgaagtgctggccgtaaatgtttactgtcgttttggtttttttgccgtcagacaacgtttctcctccattccgcgagaatcctagttcctatcataccacgattatcgtttgaatggaaagacaagcctcgggctgttatgatacactggtatatacagtgaaaagtgccaaaaaaggagattatatcgtgtcccattctgttataaaagtatccgcttccgctatggaacaaatgaaacaatcctatgccggctcccttactcccgccgttccgcagggcgccgtcttccaggccaagcccccgggctgtaccattacagcctaccgctcgggcaaggttctctttcagggaaaaaacgccggcacagaagcggcccgctggggaacggctgaggcgccgaaggcaaagaaaaccgtcaaaaaagcggccgatccgctttacgctcccccggcgggcattgcctccatgtcagtgatcggctctgatgaagtcggaacaggcgattacttcgggccgataacggttgcctgcgcttacgccgacaaaacaaagctttctttaatgaaagaactcggtgtgaaggattcgaaggatttaaaagatccgcagattattgaaatcgccaaactgttaattaaaaccattccttacagcctgcttgtgttgaaaaacgaaaaatacaatcagatgcaggaaaaaggcatgagccaaggaaaaatgaaggcgctccttcataatcaggcgatttccaatctgctgagaaaaatgaacggcgttaaaccggaagcgattctgattgaccaatttgcagagcccggcatttattttaagcatctttccggacgggatatcgtaaaagaaaaaacgtttttcagcacgaaagcggaaagcatacatctttccgtcgccgcagcctctatcattgcgcgatattctttcttaattgaaatggataagctttcccgtgaggctgggatgacgattccaaaaggcgcggggccgcacgtcgatgaagctgccgccaagctgatcatcaataagggagaaggtgcgctcagaacgttcaccaaacttcattttgccaatacgcaaaaagcgaaacgccttgtagaacggaaacggtcataataaaaaaagcttgcagaatgatctgcaagctttttctttatcctcttaataccgcctgatacgtttcttccagcgctttcagcacgttttcatgtacttttgtcacttcttcttctgtcaatgtttgttcagggttaacatattggagcgagaaggcgacggattttttgccctcttccatatgctcaccttcgtacacatcaaatacggtgacttctttcagcagcgcgccgccggcttctttgatcacggcttcgagctgtccgcttgtaacggttttatctgccacaagcgcaatgtcgcgcgtgacggacgggtacttcggaatcggcgtatacacgacaggttctgtttcctcggtcagaagcgcgtgcagatcaagctcgaacacatacgtttctttgatatccagctctttttccattgccggatgcacctggccgataaatccggcaagcgaaccgttcaatagaatgtttgccgtccggccgggatgcatgtttttgcgtgcagactggacaaattcaacccgatctgacacattcaattgatgcagcaggccttcaacgattcctttggcgacgaagaaatcaaccggctttttctcaccctgccataaatttttgcgccacaatccggttacagctccggcaacccgttctttttcaaccggttttgtgttttcttctttcgtcagaaatacagaacccgtttcatataaagcaacggaatcagtctgtctggccagattgtatgaaacggcttcaagaagattcggcacgagactgtgtctgagaatgcttctttcttcgctcatcggcagagcaagcatcgtgttgaatgatttttcgatcgcaaaagcggccgcttttttatcattcgttaatgaataagtggtcgcttgtgaaagacccgctccttcaaggaaacgtctcactttccggcgttttgcctgatacggtgtcaagccgcctgtcgtgccggccgtttccggaagcgtggacggaatattgtcatacccgtacaatctcgccgcttcttcaatcaggtcttcttctattctaatatctccgcggcgggacggcactgttacgacgagaacgtcttcagcttcactgactgcaaacccgaggcgcttgtaaatgctgatgatttcttctttagcgattgccatgccaagcacggcgttcactttttcaacagacacgtgaatgttgtttgcttcgattttcagatggttttcttcaaccgtgcctgagagcacttctccgccggcatatgcctgaatgagactgcaggcccgttcagccgccagcaaaacgcgggccggatcaatgcctttttcatatctggcgctcgcttcgcttctcagtccgaggtctctcgacgctttgcggacggtctgtccgtcgaaataagcggcttccagtaaaatcgcagtggtgtcttcacggacttcagactcggctccgcccatgactcccgcaacggcttgcgctttttttccgtttgtgatgaccaaatggctgcttgacagcttgcgctcttgttcatccagcgtcacgatggtttcgttttccgccgcttttctgacgacgacctcttttgaaccgaaccggtcgtaatcgaaagcgtgaagcggctgtccgtactcaaggaggacgaagtttgtaatgtccacgacgttattatgcgggcggatgcctgcattcatcagcttcgtctgcatccaaagcggtgacgggccgattttgacgtttttaatgatttttgcggcataatgcggattggcctgcgtatcttcaatcttgacggaaacagcatccgccgctttttctgccgctttttcatatgaagcctccggaagctttacctctgcgccgaggatagccgccacttcataagccacgccaagcatgttcatcgcgtcggcgcggttcggcgttaagccgaattctaaaatcgcatcatcaagctgaagggccgccattgcgtcagctcccgtttcagcatcattcggaaaaacgaaaatgccttccgcatattctttcgccacgagcttgctttcaatgccgagctcctgaagggaacagatcatgccgtgagacgcttcgccgcgcagcttggcttttttaattttgaaattgccgggaagcacggctccgaccgttgcaacggcaaccttctgtcctttatcaacattcggggcgccgcagataatctgcacgggttcctccgcaccgatatcaacaaggcatttgttgagtttgtcggcattcggatgctgttcacgctcaagcacgtgtccgatgacaacgccttttacgccctcccctttatactcgataccctcaacttcaataccggctctcgtaattttttctgcaagcacggccgggtcgattccctgcaagtcaacgtaatcttctaaccatttatatgaaacaaacatgtgtatcctcctcttacgcctgtttaaactgcgaaatgaatctgacatcattggtatagaaatggcggatatcttcaatgccgtatttcagcatcgcgatacgttccacacccattccgaaagcaaaaccctggtattcctcaggattgaatccggccatcttcagcacgttcgggtgaaccatgccggcgccgagaatttcgatccagcctgtttttttgcagacggagcagccttgtccgccgcacttaaagcaggtcacatccacctcgacagaaggctctgtgaacgggaaaaagctcggacggagcctgatttcacggtcttggccgaacatttttttggcgaccaattcaagcgtgcctttcaggtcgctcatgctgattttgcggtccacgacgagaccctcgatctgcatgaactgatgggaatgtgtcgcgtcatcgttgtcgcggcgatacactttaccgggacaaatgattttgacggggccttttcctttatgcttttccatcgttcgcgtctgcaccggtgacgtctgcgttctcatcagcatttcttctgtaatgtaaaagctgtcctgcatgtcgcgggccggatgttccttcggcaggttcagcgcctcaaagttgtaataatccgtttccacttcagggccttcttcgacggtatatcccatgccgataaataaatcttcaatttcttcaataacgaccgtcagcggatggcgtcccccgatgtttacctgactgcccggcaacgtgacgtcaatcgtctggctgctgagttttttattcatctcttcttgttcaagctgttcatttttcgccgtaatggctgctgcaatgcgctctctcacttcattggcgagcgctcccattttcgggcgctcttcggcggacagtttgcccatgccgcggagaacttctgtaatcggccctttttttccgagatattgcacccgaatgtcgttaacttcttttaatgaacccgccgcttctactttttctgcagcttccagttcgagctgtttaagcttctcttccatcatgcatcctccttttatgtaaaccaaaccgttctatgcctttttcagaaaacaaaaaaacccgccccttgagagaagggacgagttgtggccgcggtaccaccctttttaaggcagacttcatctgccgacagcttcattgacataacggaaacgatcgttccggttcacctttacgcgcgtttggcgcggtcccggtgacaactcgagaggtgaaaatcaatttctgtgctgcgataaaaatgctctcagtcagcggcattttctccctggaaggcagcgtgtgcaaaaattgacgtcctctgtcacggtttttacattattgctatctattatagtgaaatccaaggtttttcgcaacctatcctctgagatgataaacgaggatggcggccgctaccgccacattcagcgattccgcctgtccgtacagcggaacgtacagattgagatcggttttttgcagaaggccggcgtccactcccgccccctcgttcccgacgattaacgcgaacgattcttcaggcttcacgctttgataagccgcaccgttttcaagcgccgtgccgtagatcgcgacgccttgtgatttcagctcggcggtaaactcatcaagcggacgttttaaaatgggaatatgaaaatgagatccttgcgctgaacgcagcgtttttccgttgtacgggtctgccgttccctcaccaaggacaacggcgtcgattcccgccgcatctgccgttctgatcattgttcctaaattccccgggtcctgtacggcatcaatcagaagcagccgcttcagctgatcaggccgcttatccggcatatggcagaccgcggcgatccgctgcggcgtttccgtttccgtcacggctgaaaacgcgtcttcgctcagcacgtagcacggaatgctcatatccagatcggccggaatggcgctctcatcgtttacgagaatttcttttaccgttccctttgatttgagcgcttcttctgccagatgctctccttctatcagaaatgtattcgttttaagtctctctttttttgtgtgaagttttttccagtccttcactttttggttttttgcagagtcgattcgtttcactttatgtctgtgctctccttttttcatgcatgttgttattatatctcaagaacagcacataataaaccgcgtgcgcggtaagaatatgcgtatcacattcaggaaaaaggagcggttgtaatggatcttaatttacgcaacgccgttattgccaatgtaaccggcaataaccaggatcagctggagcatactatcgttgacgccatccaaagcggtgaagaaaaaatgcttccgggcctcggcgtcttattcgaagttctttggcagcatgcgtcagactcagaaaaaaatgaaatgctcaaaacacttgaaggcggattaaaacctgcgcaataagcatgaaccgggtgatggcacacccggttttttttgtataataatggcgagggggatcgccatgcagttacagccggaactggcaaagaaattgattgccgaagtcaaacatatgtacagccgcgaagtgattattgccgatacaaaagggatgatcatcgcgggcaccaatgaggcgcgcgccggatggtttcatgaaggcgcactgatctgcgcccgcgaaaaacggaatgtcatcattacgaaagaagatgaaaaacgcctccagggcgtaaaagcaggactgaacctccccgttttttcaggccatgaggtaatcggagtgttcggtctgacaggagaccctgacgatatcctgcctttcggagaattgctcaggaaaatgacggagctgtttattaaagaaacgcgccatatggaagaagcgcagtggcgtgcgagaatgcttgaatcctttatggttgattggctgcagctgaaagaatggtctccgggctttttagaaaaagcaaagctcatcggcgcagaccttcacgcataccgccggatcatactcattcaaggacgttatgagcaatataaagcggaggagctcgggcggctctggcagaacgaatgccctgaagacctgtttgtccgctggggaaatgaacgcattctcattaaccatgaagcaaattcggcttccaaaacacagctcatcaaaaagatcggcgccgtttttgggcagcctgtcaccgccggcatcggacggatcgttccgggagagcgcctcgcggaatcatacgaacaggcggataaagcactttcagccggaatcggtgacaagcaggccgtctttgaagaagatttaaaactggatatgtgtattgccgatatcgcgcccggcacgaggtcggaattttcacggcgggttctcgagcatgtactcggccgggaagaacttctggatacgctgcgcgcctttttcgaccggcaattatcgttaaagcgcaccgcagacgacatgcatattcatatcaatacattgcgctaccgtctttccaaactggaatcactgacaaatatgaagcttgaccgccccgaagacataacggctttttatttggcgctccgctttttagatcaacatacaaaaagcacgtaatcatatcatcatttttcatatgtttctccatagtgtgaagaatcgtttttctttacaattaaatgaaaacgcttttcttatcagggaggttggagaacatgatttcacgagaggcaaaagaagcgttcatccggacggtcgggaaggagaattatgatgattcggcggctggccgtcttgtgtattcttacgatgcggctcctcagctgcaagccatgccggatgcggtaatcgctccccgcagcgcggatgacgtgtcccgtatattaacgatttgcagcaggcatgacattccgatcgtgccgaggggttcaggcacaaacttatgcggcggcacatgtccgtctgaaggcgggcttgtgcttttattcaaacatatgaaccgcattcttgaaatcgatgaagaaaatttgacggcaaccgtccagccgggcgtgatcacgcaagatatgattcatgcggttgaaaggaaagggttattttatccgcctgatccgagcagcatgaaaatatcgacgatcggcgggaatattaatgaaaattccggcgggctgcgcggtttgaagtacggcgtcacccgggattatgtcctcggccttgaagccgtcttggcttcaggcgatatcatccgcacaggagggaagctgacaaaggatgtcgccggttatgatctgacccggcttttcgtcggatcagaaggtacgctcggcgttgtgacggaagcgactttaaagctggttccgaagccggaaacgaaaaaaacgctgcttgcactctatgaacatattgaagcggctgcggaatctgtttctgccatcatcgctgaaaaaatcattccggcgacactcgaatttctggatcagccgacactgcaggtcattgaagattacgccaagatcgggcttccgaccgatgcaaaagcggtgctgctgatcgaacaggacggtgacatcgaaacggtcagacgagatatggaaaaaatcgaagccatctgtaaaaacggagcagccgtatccgtccaaacggccgaaaccgaggaagaggcattcgcgcttacagaggccagacggtccgcattatcagcccttgcccggctgaaaccgacgacgattctggaagacgcgaccgtgccgagatcacaaattgccggcatggtcaaagccattaacgagattgcagaaacatacggcctgtccatctgcacattcggccatgccggagacggcaacctccatccgacgtgcaccaccgatatccgaaatacagaggagatggaacgtgtcgaaaaagcttttgccgccatttttgaaaaagcgattgagctgggcgggacgataacgggtgaacacggggtcggcatcgtaaaagcgccgtatttagaaatgaagctgaaaacagaaggcattaccgccatgaaagcgatcaaacaagcgcttgatccccaaaatctgctgaatccgggaaaaatattcgccaattcatcaaggaaacgcgtggtgatgatgaaatgacaacggctaaagagcagcaacacattcaaacagaattcaaaaaccgcatggatgaaggtgaattgctgaactgtatgcgctgcggcttctgccttccttcctgtccgacctatatcgaatcaggatttcaagaatcccattcgccgcgcggccggatcgccctgatgaaagccgtcacagacggactgatcgaaccggatgaagatgtcgagcgctcactttcgctgtgtctcggatgccgggcatgcgagcccgtttgtccggcaggggtcaattacggacagctgcttgaagaagcgagggatatcattcatcaaaataaaaaacataagcccggcgtgcgcctcttgcggaaagccgccttcaccgggcttttccctcatcaaaaccgcatgcaggcagccgtgaatcttctcggaatataccaaagatcgggactgcagaccgccatcagaaaaaccggtatgctgcgcgttttgcctgaacatctgcgcacaatggaacaagtgctcccgcccgccccgaaacggaaagacatgaaggaaaggccgcgttttcttcctgccgcgggtcccgtccaaaaacgggccgcttttttctcgggctgcttaatggatacgatgtttttagcaacaaatcatgcgacaacggcgcttttacaggcggccgggtgtgaaatcgcggttccggacggccaggcgtgctgcggcgcgcttcacgggcacagcggagaaaaagagatgggaaaagaactggccaagcggaatatcgccgcttttgaggcgcttgacgctgattatatcattacaaacgccggcggatgcggcgcctttcttcaggaatatccgcatttactgaaagatgaacctggatgggcggaacgtgccgaacaattcgtccggaagctcaaagacttttcatccgtactggttgatctgaagttccatcaaaaaaacctgcgggcgcagtctcctcatatcgtcacatatcaggactcctgccatctccgcaatgtgatgcatacgtcagaagaaccgcgcacgcttttgaaaaacattaaaggggctgagtacagagaaatggaaaaggccgacagctgctgcgggtcggcgggaatttataatataacagagtcagaaatgtctatgaaaatattagacagcaagatgaaagccgccggaaaaacggaggcggccgtcatcgtgacagccaatcccggatgccttctgcaaatgcagctcggcattttacgcgaaggattaacaggccgtgtccgcgcggttcatttggcggattaccttttggaagcggcggatttgtcataagccgaaagcagagagaccgatcggctctctgcctttatgatgctacaatgttcggatcggccgcggatttatccgggtattgaagcttccagtctggcactcggatcacgccatacattcgcccattttttcacagccgcaatgataatcacaagcccgagaatcagcatgataatggataaaacgccattcagcacgttgtatcccgccgcttcggggttcaaatacacataccgcaccatccaataacccgcatagttgacggtcacgtacaaataagcgagaggaatcaggcatgtcagcatatagcgccgcttatccgctatttttaatacgacggtcgcaccgatgattaagccgacagatgccataagctgattggatacgccgaacagcgcccaaatggaactgatgtcgcccgaatacagaagatagccccacagcaggcaggcgagcgcgcttgagaaaatcgagcccggcagccagtctgtttttttcagcggcttatagacctctccgaaaaactcttgaatcaagtaccgggcgacacgggttcccgcatcaatcgccgttaaaataaacaccgcttcaaacataatgacgaattgaaaaaagtatgaagccaaatgactgaaaaacggaatctccgtaaagatatacgtcattccgacggcaagcgtaacggctccgcccgttcttccttccagactgagcccgatttctttactcaattcaggcagatggacgacattcatcccgagggcgcggaatatttcaggcgtgctgttaatggcaaaatagtcggcgggctcaagagcggcagctgcaatgagcgccataattccgacgagacattccacaagcatcgctccgaaagcaaccggttttatatcactccatttatccagcattttcggcgttgtgccagaaccgacaaatgcatgaaagcccgaaatggcgccgcaggcaatcgttattgaaataaacggccagacaggacccgcgatcaccggccctccgccgtgaataaactccgttacggccgggaatttaatggcgggattgacgaaaaagacgcctgcgatcaaagcggcaaaaaccccgattttcataaaactgcttaaatagtcacgcggagccagcaaaagccaaaccggaagcgccgcggcgaaaaacgcatagacgggaagcgccactgcaagcgttttcgcatcaagtgtcagcatgtccccgagagccgttgtctgcagccgcggcccgattacaacaccggccattaacaaaagaaacccgacagttgatgcgagtttgagattgcccgtttttttatagtagaggccgacccccatcgcgatcggaatcgtaatccccaccgcaaacgttccccacgggtttttctcaagcgcgtgcagcacaaccatggacagacccgccatcgtgatcgtaatgataaacagcatggaaagaccggtgcaaaagcccgccaccgggccgagctcttctttggcgacttcagaaagcgttttcccgtttttccgcattgatgcaaacaatacgacaatatcgtgcacggctcccccgatcaccgctccgattaacagccataaaagcccgggcagatagccaaactgagctgccagaatcggtccgacaagcgggccggcagcggcgattgccgcgaagtggtggccgaatgacacccacttattcgtgggcacataatctttcccatcctcaagcacatgggccggagtcggtgtctgatcattgatttttaatactttgaccatcataaaggtaccgtaaagccgataggcgatcgccaaaatacatatagacgctatgacgattgtaatcgcattcatttaatcccagccccttttctctttttctaaatattatcataattatcagataacaggagatgatttttgcgtaaaaaaaagccggcagcggcagcccggcttttcggaacattattttcctgataaacggatgacattccaggacagcggagtaaaatgtgccgttatcccttcagcgtttgccgaagacgttccgttggagtgaggaatgacttcttttctgtttttttgattggttgctttcatatcctgatgctccagcacgatatgctcaatgatgcggtaatcttcaaaccccctcagtttgatctccgtttccatcggttccttgcttttgttgacggcaaaaatggtcagtgcttcatcctcttcatggtaaacggccgcggcatcaacatacggcacatccgtaaagtccgccgagtcgtatttcggggaggtgatcagcagcttcatcgaagtccctctcccgtagactgaggcgtgcatgtaagggtaaaagatcggctgcctccatgcttctccgcccttttcagtcatgataggcgcaatcacgttgacaagctgggcgagacaggcgatcttcagtctgtccgcatgctgcagcatcgtaatcagcagtgaaccgatcaacagcgcatcttcaaaattgtagatgtcttcgagaatcggccgggccgtaatccatggctccacttttttatccgcttcatttgagtgataccacacattccattcatctaaagaaaggtgaatcgtttttttgctgcgttttttcgctttcatataatcacatacggctgtgacggatttaataaaatggtctaaatccatagacttcgccaaatagttctcaagatcattttcatggttgccgtaatacgtatgcagtgaaatgtaatccacatgctcgtacgtatgctcaagcacctcggcctcccactcgatgaaggacggcatgccgctgtttgagcttccgcaagccaccaattcgatcgtcgggtccgtccatttcatcacctttgctgtttcagcggcaagccgtccgtattcatgcgccgttttatgaccgatctgccaagggccgtccatctcatttcctaagcaccatgttttgatgccgtaaggtttttcatatccgtgcgattttcgtaagtcgctccagtatgacccttcaggatggttgcagtattcgacgaggttccgggcggcatcgattcctctcgtcccgagattgaccgccatattcacttcggcgttcacttttttcgcccacgttaaaaattcattcgtccccacttcgttcgtttctgtcgtctgccatgccaaatcaagcctccgcgggcggttcttcaccggcccgacgccgtcctcccaattgtagcctgagagaaaattccctcccggatagcggatgaacggcacttgcaattccttgattaactcctgcacgtctgttctgaaaccgtccttgtcggctttcgggtgtccgggctcataaatgccttcatacaccgcccggcccatatgttctataaaagatccgtacatccgtttgtccacttcaccgatgatatattctttatctgctgtaatccccgcttttttcattacatttcctccctctctctatcccttcactccgcctactgtgaggccggaaatgaagtatttttgaaaaaacaagaatatgatgatcaccggcagtatcgcaaaaacggacccggaaatcagcatgtcatagttgttgccgtacggactcagcagccctgaaagtccgattggaagcgtaaacatttctttcgaccgaagcacgatcagcggccataaaaagttattccagctgtttaaagattgaagaatgatcattgctccgaatgccggtttcatgagcggcgccataattctgaagaaaatgccgaattcggtgcagccgtccattctcgctgaatcaagaagatccttcggaagtccgagcgcatattgccggaaaaagaacacggcgacaggcgacacaataaacggcagaatcacccccgtataagaatcgattaaatgaagacccaccgtcaatttgaacaacgggagcatcatcacttcaagaggcaccatcataatgatcagcacaagaacgaaaataatatttctgcctttaaactcgtagacaccgagtccgtagccgatcaaagaggaaaaaaacagcgtgagaaccgtggtgaggacgccgagcagcaggctgttaaaaaaccatttaaaataaatgctccccccgttgaacaaataggtgtagttatcaaggctcatcacatccggatcaagacgcagattcagcccgatgcgcatcagctcagatgacggctttaatgaaccgagcaatagacagatcatcggaaagatatacaacaggctcagcatgataaaaaacaaggtaaacgcgactctgtacacggaaaacatgtgattgttacgcaacgcttatccctcccctttaaacgaaccggacagtttcagtgaaacaaggctgactagtaagatgacaagcaaaaggacaattccgattgctgccccgtaccccatttcgttgtatgcaagcccctgctgatataaataaccgacaagcgtgaggccgatattgcccggggaattattctgccaaagcacatagctttcctcaaacattctgaaaccgccgatcatactgatcgttaacacataaacggacaccggctttaaaaatggaagggtgatatgccggaactttttccacgtactcgccccgtcaatttcagccgcctcatacaattctttcggcacattttgcaaacccgccagaaagtaaagaatgttaatccccatccacctccatgacgcaagcagcaccattaaaaacatgccggtacctttgttgttgagccagttttggggtgatgcgccaagcttcatcatcagctcgtttgcaagcgacgtattcatttctccgaacatcagccggaaaataatccccgctacgatcgtcgatgttaaagccggtacaaacagagccgatttaaacacatttctgaacctgacgagcttcgaattcagaatcaccgctaaaagaagcggcaccggaatcagcacgatcagcgtccagaaagtatattccaatgtgttaaataatgccgtataaaaggttggattaagaagagcggtataattggaaaacccgacaaatgtaatttctcccggcagtatccgctgaaagctcatgataaacacgctgatgatcggatacaaaaagaaaacgagaaacgaaatgataaatggcgccgtaaaaagataaggcgccgctttttttgaatacagcacattgcgccggcgcggcttcttccggactgcagaaacggtttgcgctgtctctgtctttacaggtctcataaaagctcccccgctttcactgttaaatagggcggcttctcctatttttctaattgctctgccgcctcgtccaaggcttcctcaggtgttttttcctgcgtcttcagcgcatcgaacagcacctgtctgacaacgagatcagccgctttagagaagtcttcatgcagataaatcggattgatctcatcttttatttcaaggagcgaggaaaaaattgacgtaccgttccggaagaaatccgtgtacttgtttttctccttcaattcttttgaatcccacacgtcccagcggagcgggtcaaagccgagcaccgtccacagctttatgttcccttcctttgaacctttcgcaaatccgagaaattctttcgcgagctccagatgttcagcctgcttcggcacgacggtggctgttccgcctaaacccgctgatctgtcaccgccttctttccaggccggcatagggtaaatcgccattttcccttttaaatcaggcatataatcgataaaccgtcccatgtaccaaatgggcatcagcactgaggctgccccgccctgattcataaaaccgtagtattcttcgctgtgatggccgccgccgggagccggcagaagggttttatcatttaccatgtcctttacatcattcagtgtatctgtattcgtcttgctgttcagaatcaattttccgtttttgctgtagtagcctgacccttgctgcgaaatcatggataggaatgtggcggagtcgtttgtttcaaccgttcccatcggtttcccagcggcttcacgcactttttttcctgcccgccggtaatcttcccatgtcttaatggaggcgggatcaacgcccgcttttttcatgatatccatgttgtaaaacatgacggtcgtccccacatgtgtatcaaggccgtacaattttccgtttttgctgtataaggccagacgcgcttccacaaacttatcgcggtctttttcaatcagcggcgtcagatcggcaagcgggatatccttccccttcagaaagttcgagaaccggcttaattccacgtcggctatatcgggaagcccctcacccgcgatcagcgaaaccgataaattatcatgcatttgtccataaggataaacaacggtattcagcttgattttgcgatccggatacttctgattccattctttgaccatttcctgataaaactgttcgtgcagaccgttaaacgtccaaaacgtcagctccgtttctcccggccggccggcagtccgttcttgtgaacagccggcggtaaacaagaagagcatcatcagcaccaaacatacagcggtcgtttttttcatgtcattaccccttccactttaggccgtgcggctattgatgcaaatgatgtgcaaagagcgctgcattttcatttatgatggttaaaccggtataacggtctcgcagtgtgtgcgcatgcttaagcgcatcgctgacaaggtccttttttacaccgatctcatcgaaacaggcgggacctcccgcagatgagagccacccggcaattgttttgccgtcgggaagcccttcatatgcggactgaatcgcctcgcgaaagtgcggcggcagttcagcaagcttttcgtgacaagccagttctttgtaaatatcactcagcaccgcgcacgcacagccgaccttcgcaccgtggagaatcggaggctgttttgccttcagcatttccatctcaatccaatgcgagatgtgatgctctcctcctgaggcggggcgggagtggtcaagagcaagcatgacaagacccgaaacgatcagcgcttccatcagtatctgaatgccggcctccgttcccatggcaatgtcagcgcggtgatcaatgcactgccaaagcgcgtctttcacaagcttcgccccggcttctgagtacggctcacccgcaagcctgcgggaaatctcccaatcagccagcgatgttattttcccgagcatgtctccgaagcccgcggctgtcattgaacggggcgcttcttttaatacattcgtatcggcaaataaggcgatgggcgctttcgtttgaatcgtcgttttgattccgtttaatatgagcggcgctcccgccgatgtaaaaccgtcgactgacggagcggtggggaatgagataaacggcaatccgcgctgataagcggcaaaccgcgtaatgtcgtgaatcgttcctgaaccggccgctatgataacatccgtctcttccgcgagattgatcagcgtatagaccaatgtcctctcatcagccgcggcggccccggcttcatgctccggaatgatgacttttgacgctttgattccgcctgcccttaattcgtccgcaagcagacgtcccgccgcctcgtacgtgttccggtcacagacgatgaccggatgattccagcattttttttgcagaaatctgagaagctcttcttttgcattcgccccgatcacgatatcttctatttgaatcggtgagcggctggccccttccttgtcaaactcggattgaatgtcctcaggagaacgtttcataaaaggattccctccttcgctaattctgtcaggtctttaatagaatcaaggacgatgtcaggttcatatagacggggctccccaagtttggccgaccccgtcagaaccaatatgcttttcattccgtacagcctgcccattgcgatatcagattcgaggctgtctccgattatggcgcattcctcagggggaagtccgagcgcttcacatgccgcctcagccatcagccaagacggtttgccgatgacaagctccgtttttgctccggcggatgcttcaatggccccgatcattcccgcgacatccatggcatgaccgccttcattcggaaaggagcggtctttgttcgtggcgatgatgcgcgcgccggaggaagccgccttaaaagcgagattcagatccttataggtgacggtttcatgcagggagatgacaagccagtctgccgcctgcgggttttgcgccaggacgacacccgctaaagcgagttcatcagtcagccctttctctcctaacacccagacctttgacaaaggataatgcttctttaaaaatgatgccgtcacactggaggacagcacgatgctccgttcatccgtgcggataccggcacccagcagtttctttctgcacattgcttttgatagattgccgcggttgcttaaaaagacaacggctttgcccagtgactgaagggtatgaacggcttcttttgcgccgtcaatcagctcccgccccctgaatacggttccgtctaaatcaatcagaaacccggctgcgtcaagtttggccataataagcattcgccccgtgttttctgtaaaaatgcttatcatgcagcactctgtcgatcggactgagctgtttgttcagcataagcgaatggtaggccatttccgctaccgtttcgagcacaacggcgttatgcagggcattcagcgcgtccgttccccagcagaacgggccgtggctgtggacgaggacacccggattttgttcatacggttcgttttgaaaggtttcggctataactttgcctgtatgatactcgtaatctttcacaatttcttcttcatacatttccctcgtgcagggtatagcgctttcaaagtaatccgcgtgagtcgttccgagagcgggtatgtctcttccggactgcgcccagctcgtcgcccagcgggagtgagtatgaacgattccgccgatagccggaaacgctttatacagataaagatgggtcggcgtgtcagaagacggtttcagcgagccttccaaaatgtctccgtcctcattcaggacgaccagcttgtcagcggtcagctcactgtaatcgacaccgctcggtttaatgacgattctcccgctctctctgtcaatgccgctgacattcccccatgtaaacgtgacaaggttatgttcctcaagcttcagattggcggcgagcacttcttcttttaacgcttcaagcatggcggctcccccctttcgcaaaatcacggtttttaatggctttcaggcgtttcatgacattgttttctttgccgaagtagtgtacgagctctttatattccgcatataagctgtcataaatctcagctctttcccggttcggggcataaaagccgtcttttaatttccccatatgcgcgcaagcttcagcaatattggagaatcctccgttttcccgtcccgcggcgagcgctccgaaaatcgcggagcccagtgcaggcgcctgcggagatccggataattgaatgtccatatttgtgacgtctgcgtaaatctgcatgacaaacggatttttttcggcgattcctccggctgcgtaaagctcctcgaccggaacgccgttttcccggaacgtttcgataatcatcctcgttccgaacgccgtcgcttcaatcaatgccctgtagatttcttcgggcttcgtgtgcagcgtcatgccgagcatcatgcccgtcaaatcggcgtccaccaaggttgaccggtttccgttccaccagtcaagcgcgagaaggccgctttccccgggaacaagttctgctgcttttttgctgagcagctcgtgaatgtctatgtgtttatcctcagcttccttctcatagtctctcggaacgcacgttttgacgaaccattcaaagtggtcgccgacacaggactgccccgcttcatatcccgcatatccgggcaaaatgccgttattgacgaccccgcacataccggggacgatatgttcttcctcgccgagcagcacatggcaggtagacgttcccatgatcatcagcattttccccggctctgtaataccgaccgcgggcactgacacatgagcgtcgacattggcgacggcaacggccgtccccggcagaagcccggtcagctccgccattttttcggtcaaacctcctgctttttccccgactgaataaatcgcgccgcttaatttatcctgtgtaatcgttttcattaacgggttgagcttttcgaaaaaatgatccggcggataccccgtctcctcattccagattgctttgtagccggccgtgcagttgcttcgcttcaatgaaccgcacaattgatagacgatccagtctgccgcttccacaatccgatctgccgccttgtatatatgcggcgcttcttccgcgatttgcatgattttcgggatcatccattcagaagaaattttaccgccgtatcttttaaggaatgtttcttttgtgtcttcggcaatcgtgttcaaacggtctgcatgtttttgagccgcatgatgcttccacagcttcacataactgtggggctcccgttcaaattccggcagcatacaaagcggctgccccgcgccgtctatcggtaaaatcgtgcaggcggtgaaatcaattcctatgccgatcacgtcttttggatcagcgcccgcctgctcaagcaggttcggaatcgccgtttccagaacttcgatataatcggcaggatgctgaagcgcccagtcccgagggagtttttcacccgtcttcggcagcgtgcggtcgatgacggcatgagtgtattcttttaccgcagacgcgatttcttcgcccgtgcggacattgacaagcaccgcccggccggacaatgtgccgaaatcaacaccaatcgtatacgccatatcaattccctcccagccggtataatacgtcattccatttcagctcttttttcagctcatgtatttcagtattgcgggaaataaagatgctttcaatgcctgccatctcagcccagtcaagcatctgttcagccgtaagccggaaggacatacaggtatggtgggcgcctcccgccagaatccatgcttccgcagctgttttcagcgatggctccggcttccacagcacccgcgccacagggagattcggcatatcatgatcaatttccctgccttccgcttcattcagaatgagacggaaccgcccgccgatatcaatgatgctggcgatgatggctgaaccgccgattccgttaaaaaccagccgggccggatcttccttccctccgattgagagcggatggacttcgattttcggctgatcaagggcgatcgtcggacatacttcaagcatatgtgatccgagaatcatcgcacgacccggttcaaaatggtacgtataatcttccatgaaggaggtttgttctccgtccgccattattttcatcattcgcacaagggcagccgttttccaatcgccttcgccggcaaatccgtaccctttttccatgagacgctgaacggcaagacccggaagctgcttcattccgtgcaaaacttcaaaggaggtcgaaaacgctgtatatccgccccgttcgagaaaggccgttaatccgagttcaattttcgcctgttctttaatggaagcaacttttgcttcatcccgcttcgtttcgtcgctgatgacatacaatttgtcgtattcctcataaagcgcctcaatttctgcgtcggtgacattgttcatcacctcggtaagatcgccgattccgtacccgtcaacctgccagccgaattgaatgtgggcgccgactttgtctccgtcagtaaccgccacattccgcatattgtcgccgaaccgggctactttaatattcctgctttcattccaagcggcagccgtgttcatccattgcgaaatgtcatgtttgacttcctcatcatcccaatagcctgcgatgacttttctcgtctgccccattcttgactggatatatccgtactcccggtctccgtgagcggattggttgctgttcataaagtccatatcaatcgtttcccacgggatgtcgcgatgatactgggtatgcagatgaagcatcggcttttgaaaagcggaaagaccttcaatccacattttcgcaggggaaaatgtatgcatccacgtcacgaccccggcacagttttcttgatactgcgcttcccgcaaaacctctctgatcgtttcagatgacgtgacaaccggtttatgcctgatcttgtatcttgatgacaccccgctgagaccgtcacatattccctttgcgtgtttatcgacaagctgcagcgtttcctctccgtataagtgctggcttcccgttacaaaccaaaattcatattctttgttctgaagcacattcatttccccttcccatcaaaataaagcgcttgcatttttaaataaatatacgtacgaatataaataataaaacttttattcttttatttgtacgaacaactttattatagttaaggaggaatcaaactgtcaatcttttattgcaagtaaaaaagccggacacacatgcccggctgatcaattaataggaaggccagcctgaactccaatcgatatcattgatgagcatcttcggaattccgctgttttcggcatcatacgcatgacgcactaaaatattcccgttcacaatgtcttgaccgcccgggcctttccagcggtcattgccggaatcaagaatcgtccctccgccttcagacatgcttttcccgcttttatcgagatatgggccggtgatgcttttggatcttccataagcgattttgtacgtactattcaccctgaacagcatttatcaaacgacaccattaagtaatagtagccgttctggtaggtgatggccggcgcttccaaagctccgccgttattcggtctggcagcgatggaataaagtgatcccgtcggtttcattgtatttttatcaagctttgtcagcttaatgccgctccaaaaagaaccgaaggcaagccaagggtttccgtctttatcaattgtcagctccggatcaattgcattgtagttattggcgcttgtcgaacggatgacaagcccttcgtccttccagtttcccgaactgaggcttgtagatgatgcaagaccgatcgcggaggtatttttgccgaatgaagaaacggcataatacagccaatactttccgttaaaatattgaacatcgggggcccattgattcagcccgtaattcggcacataattgccccaccatgacagcggggaagtaaagattgatttctgaacggtccatacgccgccgctgcccgcctttaagacgcgaagccccctctccccttccaaaccggttccgaaagcgtaccacgtgtttccttccttcgccattgtcggatcgtgaagcaattcatttgatgccccccaaaacgcggcagatgccggagatgaagacatcagaagcagaccggctgtaacgactgcgcatgaaaagcggatcatgcgtctgaatctgtttttcatttgtaaacctccctttttttaaagcgctttcaaaaacatgttgtcagatttttctatgtcttttcttattgtagacgcaaggctcatatttgtacagacaaaaaaaaaagaatctgcttaaaaaagcagattcttccgtatctttattgataagtaatacggtcaaccgtttcccggtctaattttttaattacttctgtgatcaattttaccgtattctcataatcatcccgatgcaaaatagcggcatgagtgtgaatgtagcgcgtcgcgatcgtaatggacagcgccggcactccgtttgcggttaaatgaatagaacctgaatccgtgccccctccggcaatggaatcgaattgatacggaattcccgcttcttccgccgtgtttacgacaaggtcgcgcagccctttgtgagataccattgacgcgtcatacagaataatttgcggcccttcgccgattttgctttgcgcctctttttcagaaattcccggtgtatctccggcaattccgacatccacaccgaacgcgatatcaggctggatcgtatgtgccgctgttttcgccccgcgcagcccgacttcttcttgaaccgttccgaccccgtatacttcattcgggtgatcactgtttttcagattttttaatacatcgatggcaatcgcacagccgatacggttgtcccacgctttcgccaataaatgcttttcattgttcatcactgtaaattcaaaatacggcacaatctgatcacccggaagaacgccccattccattgcttcttcacggctggacgccccgatatcgatgaacatctctttaatatcagcggctttttttctggcgtcaggaggcagaatgtgaggcggtttcgaaccgatgatccccgtgatgtcccctttttttgtcacgacggtgacgcgctgggccagcatgacctgagaccaccagccgccgacggtttgaaagcggagaaagcctttatcagtgatttgcgtcaccataaaaccgacttcgtctaaatgccctgagatcatgattttcggaccgttttctttgccggtttttttggcgattaaacttcccagccggtctgttgtgacatcatcggcaaatggttctatgtatgatttcatcacttgtcttacttctctctcatttcccggtatcccttttgcatccgttaacgctttcagcatggtgagcgtttcatctaattttgtcatcaataaacctcctttttttcactacccttcttattatacaaaaccaatgctgaagcatacgattaattcgcctgaaaaacgggtaaatgtttttatctatttcttttaaaaaaatgaaactttttgttttgtttttcgtattacatcagatcatgacaaaggtgaggaggtgccttcacacatatggccattacagtattgaggattgtcttgcttgcacttcttatttattttatttacatgtgcgtcaaattttacgcaaacccgaaaagaaggctcagactggcgcaatcaaaagagaatttttattttattgacgaacagaaaaacacgcgaaaaaatctccagcttacttataaaggagtgctctttgaaggagaaaagcatatcccttccaaagatcatccgctgtttatccatacaatatttgtatggaccgaaaatccggaaaagctgaaccgcttttctgcagatgattttgaagaagtcgaaaaaaaggtattggagcggtatccgaattgcaagattgattgggaccagcccatcaaaaaagcgaaaaaagcaggcgagcgataagctctcctgctttttattttttatacatcaaatacatgagcacaagggcggcttcagtgagaaaaagcagcggcaccccgtataaaaaggatttgtgcttcgtcttatgcctgaaggtgcgcatgccgatccatacgccgagtgagccgaacatggcggctgtgagccatattcgtttctctgatattctccacctgtgcgcctttgctcttcttttatcagcgcccatgatccaaaagccgtatccgtttatcaatacggcgtaaatgaagagagccattgattgtcaccctttacgtaaaaaaaccgctcccggaaagagagcggctttttcaacttacttgtctaactgagctttagcagcatcagcaagctgattgaaagcagtaagatcgtttacagcaagatcagcaagcattttgcggtttacttcgatgcctgaaagcttaagaccgtgcattaaacggctgtaagaaagaccgttcatacgtgcagcagcgttgatacgagtgatccaaagcttacggaaatcacgttttttctgacggcggtcacggaatgcatagtttcctgatttcatgacctgctggtttgctactttgtataatgtatgttttgaaccgaaataaccttttgctaatttaagaacctttttacgacgcttacgtgtaacagttccgccttttactcttggcattagatttccctcctaattgttccttgtccgattacttgatgttggcaagctgttgtttgatgcgtttgaagtctcctgcgctcacaatagcacccttgcgaagcttacgcttttgcttttgggatttgttggcgaataagtgacttgtgtatgcatgagaacgttttaacttcccagaacctgtctttttaaaacgtttagcagatccgcggtgagttttcatttttggcatgggatttcctccttattgcttttcgtttttcggcgcgagcattaagaacatgctgcggccgtccatttttggttttgtttcgactgtcgcaacttccgcacatgcttcagagaaacggtccaatacgcgctggccgatttctttatgagtgattgcgcgccctttaaagcggatagaagctttcactttatcgcctttttcaaggaatttaatcgcattgcgcaatttcgtgttaaagtcatgctcatcgatcgtcggacttaatctaacttcttttaagttaatgattttttgatttttgcgtgcttctttgtcctttttctgctgctcgaatcggaacttaccgtagtccatgatgcggcagacaggcggttttgcatttgctgcaactaacacaaggtcaagatttgcgcggccggcgatttcaagtgcttcctgacgggacttgatgccgagctgatcgccattttgtccgatcagacgaacttcacgtgcacggataccctcattaaccaattgatctttgctaataatgagccacctccatagtttcttcgaattgattcacaacgctttttgactgcattctgcaggcaaacaaaaagtgcgggcatgacaacacacccacactacgaacatctgcataaataaaaatgtacggtcaacctgccaactacatgaatgtgtcaatcaggtgagaagcgggtgcctctgcttgtgatttatattcaattcaataactattctacacaataccggatcattagtcaagaatgacttctccggatcaactttttcattttaacacgatgccggggtgagcgcaaggaaaaatgtgaaatttcgttctttgccgcccgcggacgtgccaacacaataaaaaacccgggtctatgacccgggtttatcctccgatgagctgaacgaataccggaatgaccagcaccgtcaccactcctacgacgacaaccgcgatacttgccattgccgcttctacttcccccatctcaatgccgaccgcaacaccgagtgcgtgtcctgatgtgccgagagccagtcccttagagattgggtgctttactttaaacagttttaagaataaagcgccaagagcatagacgataacggcgttgaaaataacggcgaaagcggtgatgtcggtgatgccgccgatcccttttgacagcggaagggcaattgccgttgtcgccgcctgcggaagcatgcttttcataacggccgcgtcgagatgaatgccttttgcgatcaaatagacaatcgtgactgagcagatagagccgacaatgatggaagacatgatctgccaccagtattttttcagcttggcacgctgtttgtataaagggatggcaaaagcgatcgtcgcgggctccaggaagaatttaataatgtctcctccgcttttataatcttcatacgaaaaaccgccgagcttcagaaaaagaattccaagcaccatcgcaacaaacagcggggtgaagaggaaaaagcctctcgtttttttaaataaatacgtgccgatgccaaaggccgcaagtgaaacgacaataccgaaatatggactcatccgttttccctcctaatgctgcacaagttcgttttcctgattggaacggcgcaccgtttgtttatcagccggagcagccttctgacgtttttggctgacagacaagatcagctgagaaaaaaggcctgtcgcccctaacagaatgatggtggcgagtaagatgacgagtgcgatctgcacgccgtactgctgcatgacgccaagtgaattcatcacggagatgcccgacgggacaaataaaaatccgatcagtgacgttaatgatgttcccagcgtttctacttgttcaagcttaatcactttcaggcataagaggacaaataataacaccaaacctactacggaagcgggtataggaatggggacaatcgctgcaatcccattagatatgagcataactacggcaaaaataaatgcttgtgtcagaaatccgtacacttttttcgcactcattttcttcacctctttctctttgttaggtccattataaaagagaaatcgatttttaaagcgctttcataacaaacggctgaatattcattctgaaatgcaaaaaacggctgctgaaatgcaaaagccgcctcatataatatgaagcagcttttttaagtccttggcgtatgtacggctgacgggaattttagaaccgtcttttaatatcagattgtaagtcgaattaaaccacggatgaatttccgtaatatgctccgtattcacgatgaacgcgcggtgcactctcaagaaacccgtatcaggcagttttttctcaatgaccgccaaagtttcatgaacggaataagacgcggcaaacgttttgacggaaacgtgtccgtcctccatgccggcgtaaataatgtccttcgtatctaaaatgacaatagattcaccggctgatacagccagtttatgcgctccggctgcggacggcagctccgagacggctcctgccctgtcctgcttcactcttttaaactttctgatcgtctggcgcactctttcttcatcaaaaggcttcgttaaataatcgagtgcgtcgacttcaaaagcttttaaagcaaattggtcatacgccgtcgcaaaaacgacggccggcggatttttcatgtttttcagccgtttggcaatatcaaatccgttttctcctgacaaatcaacgtccaaaaacagcagatccggtttttgatccatcatactgtcaaaagcggattcaatattttcagcttcgtttatgtcacttacttcattcgtccgtttcagcaaataagctaattcatctcttgccagcatttcatcatcaacgattaacaccttcagcatgttcttctcctttagtcatcagtttcaaaggcagctcaaatgatacgtccgtacctttgccggcctcactttccaatcgcagggctgccttggggccgaacagcccgatcagccgctgatttaaattgtaaagcgcggttcccgtcccttctttagacgggagcggacggtttccgagcacggacagcaattccggatcaattccccgcccgttatctccaacccgcattaaaaccgactgaccggcggataccacgctcacattgacggcacagctgtcctgctttcttgaaaatgcatggcgaagcgcattttcgacgagaatctgcagcacaaaaggaggaatttcgatgtcctccaaaccgcgttcgatttcaaggctgattttatatttcccaggaaaacgggcctgctccaatgataaatacgcctgcagatggttcagttctttagaaagcgggatgagcagctgccttgccccctggagattggaacggaaatagacgctgagctgcagcagaagctttcgggttttttctacatccgtacggcaaagagcagaaatcgtattgatcgcattaaacagaaaatgcggattgacctgtgcttgaagcgcttttatttctgcgtctttcagcaatttgctctgcagttccgcctcgccgagttcaagctgtgtggaaaacagcatggcgagtccttctgcaagctcttcttcaacccggcttaaacctgacgggcttttaaagtacattttcagcgtcccgatcgttttgccgtttgacgtcagcggcaatacaatcgccgcatgcagcggacagggatcgtgcgtgcattcaatttcttcctttgatgtcgctttcataatatgacccgttttaataacgcgctttgacaatccggtaatcaggctttcagacggaatatgatggtcggcacccgcgccgacgtgcgccaaaatcttttcgttatccgtaagcgataccgcgtccgttcctgtttgcctgtgaatgatggcggcgacgcttttgcatgagctttcattcagcccctggcggaaatacggaagcgtctgatcggcaatcatcagcaccctgtgggtttcaagggctctcgcccgttcttccttccggataatcgactgaatgatcgaaagaaaaataaaagtccctgacccgtttaccaatatcatcgggatgccgatgatgctcacaagcgtccaagcgtcagaaaacggcttggccatcaagaggatgagcagcatttgcagcgattccatcccgagtccgacaagcgcggccacacgcggtgtcggcatcctgtagcgttttctgaaataccgtccgatccagccggacaaaatgcccgctaaaacggatgagacggcacagctgactgcggtcgcgccgccgagtgataaacgatgcaggccggccagtatgccgacgccgatccccacataggggccgcctaagagtccgccgatttcaacgcccataattcttgtattggcaattgaaccggacggattaatttgaaacacccagtcattattcatgattgtattctgctgaatttctattcccgtatagttgctgatgatactgaacagcgagaaaattgaaatcagcaccgctttgcctttatagctctcaggctgctggagcgcctgtctgaacaatctggtatgagccagaacaaatcccaatatgacgataattccgactctttccagcatcatgatgatcaaatgcagcatacttttcacctgttctttcaaattttattttatcacgttttagagcccgagacagaatctgacacaaacctgcctgtttttttcaaatcatctgaaaacaaatctttcacagtctatgtatctattgtagaataaacgggagccttgcggcagagagtttcagaatataacaaagaggagaagatcatgaaagccgtattttttgatttggacgatacactgttatgggatgaaaaaagcgtcagaacaacattcagggaaacatgtttacaagcggaaaaaaaatatggccttgacccgcaaacatttgaagaggcggtacggaaagcggcacgggaattgtatatgtcatacgaaacctatccttatacggtcatgatcggcattaatccgtttgaaggattatgggcgaatttttccgagccggtcagcgaaggatttaaacagctgaatcggattgcgccggaatacagacgaaacgcctggacgaacggcttaaaaagcgtcggtatagacgatgcggcttacggcgaatatttggcggagtttttcgcggcggaacgcagacagcgcccgtatgtgtatgatgaaacgtttgcggtgcttgataagctgaaaggtgtttatgaattgcttctgctgacaaacggcgatcccagcctgcagaaagaaaaactagccggcgttcctgagctcgcgccttattttaatgaaatcgtcatctcaggcgctttcggaaaagggaaacccgatgcctccatattcgaacattgcctcggcctcctgaacctgaaaaaagaagacgccattatggtcggagataacctcaatactgatatattgggagcgaaacgggcaggcattacgacagtctgggtaaaccggacacaaaagaaaaatgatacggacattgcgcctgattacgtgatcagcgatcttcacgagctgtttgcgattatagagaaacaaaaagaaagataattttatacgcaaaaaaaccccattctgaatgaacggggttttttgtatttccggttattttttcgcttctgctacagcctttttcacaaaatcgtccaatgagacggtttctgatttctgctcgccgtatttccggacgtttaccgcgccgttttccgcttcttggtcaccgaccacaagcatgtacgggattttttgcatttgcgcttcacggattttatagccgattttttcgtcccggctgtcaagctcgacacgcaggccttcgcgctgcaggcgctcctgcacttttttcgcgtagtcaagatgcacggacggtgatacaggaatgacttggaattgcaccggcgcaagccatgtcggaagggcgcctttgtgctcttcgattaagaaagcaacgaaacgctccatcgttgatacgacgccgcggtgaataacgacagggcggtgctgtttgccgtcttctccgacgtaagtgagatcaaagcgttccggaagaaggaagtcaagctgtacagttgacaatgtctcttctttgccgatcgccgttttcacctgcacgtcaagtttagggccgtaaaacgccgcttcgccttccgcttcataatagtcgtgccccatctcatccattgccgccttcagcatggattgcgctttgttccacatctcatcatcatcaaaatatttttccgtatcttcaggatcgcggtaagacaggcggaatgtgtaatcactcagtccgaagtcttcgtatacgtcttgaatcaaacggacggtgcggatgaattcttctttaatctgatcagggcggacgaaaatgtgcgcgtcatttaacgtcatgccgcgtacgcgctgaagacctgaaagcgccccggacatttcataacgatgcatcgttccgagctcggcgatgcggatcggaagctcgcggtagctgtgaatgtcctgtttgtaaatcatcatatggtgaggacagttcatcggacggagcacgagtgtttcattgtccatttccatcggagggaacattgtatcctgataatgatcccagtgccctgatgtttcgtacaggtctttgcttccgaggacaggcgtatacacatgctcataaccgaggctcagctctttatccacaatgtagcgctcgatcacgcggcggatggtcgcgcctttcggcagccagagcggcagaccttgtccgactttttgagagttggcaaacaattttaattctttgcccagttttcggtggtcacgctctttcgcttcttcaagcatgcgcaaatgctctttcaagtcatcctttttaaagaaagccgtgccgtaaatccgctgaagcatttggtttttgctgtcgccgcgccagtatgcgcccgcaaggctcagcagcttaaattctttaattttgcctgtagacggcacgtgcacgccgcggcacaggtcaaaaaattcgccctgctcataaatagagaccgtttcgtcttctggaatcgcatccagcagttcaagcttcagattatcgccgatttccgcaaacatggcttttgcttcatcacggctcacttcttttcggatgatcggcagattttcaccgatgatgcgtttcatttctttttcaatcttcggaaggtcatccggcgtcagcgcctgctccatttcaacgtcataatagaacccgttttcaatgacggggccgactccgaatttcacatctttataaatgcgtttaatcgcctgggccaataaatgcgccgtgctgtgccgcatgatgttcaaaccttcttctgtgccttctgtaatgatttctacggcaccgtcctcttgaatcggcgttcttaaatcaatttcctgtccgttcagttttccggctaaagactttttctttaatcccggactgatggatgccgcgatatcttctgttgtagttcctttcggaaattcctttaccgctccgtccggaaatgtgatgttgatcatatctgacatcttcgtcactcctttttttatgcaaatcaaaaaccccgccccctatgaaagggacgaggttaaataaacggaatcgtggttccacccttttttccgcgcggccgattgcttcggcactgcggctctaagctctgtaacgggagttcccgtcagctattactggcgcttattccggcgttcacagctgaagttcaaaggcggtaaagacaatgatccatagctggaaagctttcagcctgggctctcctctcttatacagccggtatcaatgcttcatgtccttatcaatacgtgtagcaatcattaatcttttatgtattataaaatgtctgtgagaaaaatgcaactcggttttccgtctgatttcgcacagacagccctgccgcttacacaaggccgtccgtgcggctatccttccgtcttctcggctgcaaacgcgcccagcggaaaaaggcgcaccctctcctgaaacacgttttgaatggttcttgacatcatatgttccggtttgtccgtatacagttcgaccgtctcaggcgcaatggagatcagcggcgcaaggagatgggaatctatatacatcgggtgctcccgcacaaaccgtctgtctatgtattttttctgttcccgttcagacacatagcgcagctcccacagcgtaaaagcccggtcatgtacgatgcggactttcttcatccgcggcggattggatgtcacataatctctcagagactggataaagttttgatattcctgttccatccggtattcatctatcgcggcctccgtatattctctgagcctctcataatacctgccgagccggaacgtctgaaacgaacgcacggaaaaaacacccgcatcaagtgaaatcgttcggagcgcatctgaaataaactgtgtgcgcggctctttcttcggctcaaacggatgatcctcaagctctccttccataatgctgtgtgcaagctgaaggatttgctgctgttcatcctgatcggtgaagcagtatgcgtcctcaataagcgaaagcatatgctcgtcttctttgcattccaaaaaaaacctgacaagtatcggctcaataaagcgctgaacgcaaaaagccgtttcagaccttgcgattccgactttttttatgccttcacggacaataaaatgtctccggtcgtccgattgctgaatgagatgtaaaaaagcggcggtatcgtggtcatcttcaaagatcacttcaagcatatttgtccccccttacggcatctgttacaagtatatgggggatgtttttaaaatagacgtaaaggttagctttcaccgccgaacaaatgacgcaccttctttttaaatataacgggaagcgataaaaatacgacgtaaagacagatcacgcagagtacggccagcacattgccggacataaagctcgcgccgagcacattcaggacgatcgtccccggaatgatgcccgctgcggtcgccaaaaaatacgttaccggcctgactttcgataggcccgcggcatagctgatcacatcaaagttaacaggcagaatgcgcaggataaaaatataaaagaagccattggttttcatctgcttttgaatggcttccatttttccatgacggcttttctcattaaaggcaaacagccccgccgcaaaaaaagacgcggcggcagcgcccattgagcccgccagcgtatacatggtgccgaaaaacgggccgaacgccaatcctccggcgacggaaacgattgatacgggaaacagcacaaaaggcctgacgatggaaattccgataaacacaagcggcgcaaaaacaccgaacgataacacccacagccggatctccttaggcgacagattcagatatttgcggtttgcccacagcaaaagacccgctcccgccgcagccgcagcccaagtgacagccttcttattcctcattccctcaaatccttcccattggacgccggcatcatgaacggcggcggttttccccgtcaagacggacgggcgaagccaaatataaaatccgctccatcagtcttgccgcttttacttcttccttttctccccgctgtgaatacgtaaaatgatgcttcagctcgtctggtgaaaaattagacgagaagaaagtgggaagctgctggctcattctgtgctgaagcacggtgccgatgacttcatccctgacccagcttgtcattgactccgctccgatgtcatcaagcatcagtacgggcgtcgttttcaccatattcagtttcgcctccagcgactgatcctgaagcgagtttttcagctctctgacaaattcgggaacatatacgatcattgatgaatactctttttccgccagttcattggcaatggcggctaaaataaatgtctttccgattccgaattttccgtacagatacagccctttgccttttcccgtttcattatagctcttcagaaaatccgtcacatgctggaaaatgccgagtctgctcggatcggtaatgtcgatctgctgaaacgtcgcgccgagaagatcctgctggatatacatgctcttcatcagggacttttgccttttctggcggtcgagctttctcttttccggacattcgtaatattcaatatcaatggaacgcccgttgatcacaagcttcggatggtagccttcaagcaggctgttcgtccggctgtctttcgaacagaaggcgcactgtttactttgctgaacgaattcgtacagtttatttaaccctctgtcaatcatgctttgattgataacatctttctgttccttcaaaaaagcctggacgtcttcgtcggccataacttgctgctgcattcgttccaggcgtttttgaaagtcaggtcttttcgtcacgccttctaaggatcggctgatcggttccattcaatatcaccccgcttctctgtctcaataggcagagtattttttcagttttttcatttcttccatcatttttttcttctgttcttcaagatcctgtgcggaaagagccgtctgttcttgtttcttcccggtttcttcttctttcatccaatcagggcgcttttcttcccggacggtttttttgccgcgcgccgcgccgtttgttttgccgtccgcccaatcaagatattgcctgtgctcttcgattgcgagcttcattgcttcccgtaccgttttgactttctttctggcccagtgggcggcgattttttggatatagtttttggacagcttcatatccgttttcagcatgacataataaatcagcacattggtgacgccgggctcaagcttttgttcgaacataatatcggcgataatctgcaggtcggcttttgacggctcggtcccgtccgcaatgtcctggagaagctttctcggtgatatggtctcaagctgtgcgatgagttcgccgttcaatgaatcgtccttttccgtccggttttctctcaaggtgacaggctgtgttttatcaatcagttcgggaagcttgccgcttctttcaatttggtaccagtcgctggccgctttcctcagcgcttcggccgttatcgtatcctgctcattaattgcggtcatgacgacgtgctgcatggagataggatctattccgtataaatatgaaagctttttaatgctctcccgcacatcctgtgtgattgatttgcgcggtatcatcgtttctgataaccccgccaaaaacagctcaaaatcaaacacttcctccgtcaccgtataggaaggcgcttgtccgacagacgccgtctcatagtcctcggggagcttcatcgcctcttccatatcaggcgtcattttccattcactcggctgaaaagaggcaaaagcgtgattaaacggacgggtaatttcccttgcgcccgcgccgacggaagggtgcgtgtaaaattgtctcagctgctggtatttcgttttaccgactctgttataaagaaagacattcagcatgccgtcttcaaaaaaatcattcggcctgagcgggggcagcagctcataaataaacatccgctctttttgctcggactcccggatatacactttcagcagtccgattccttcaagctttccctgttcatgatgaatcttttttaaatttgactgcatcatgcccatcagctgcctgtgcgtggattccgctccccacaagcggttctgctcaagctccccccataaggtcatataaagggagaatgcaaaagaaccgatcagcggctggtacagatgtgtcaaaacctgtctgtcgacatcctgaagaagcgaacggcttttgaccgtataaggatctacaggcaatacgtcattccaatagtcagccatgattctcaaaccttccgatatgtttctactctcattttacaccgtttctgcgatctatcaaatgccaattttgctcatgagaaaagagccagacacaatctcttagctctctcagcgttctttctttattaaatctttcaattcatcgataaacacgtttatatccttaaactgccggtagacggaggcaaagcggacataagacacctcatcgattttcgccaggcggtccattaccatttcaccgacaagttcgcttttgacttcagatacgccttggtttctcagctctttttcaatgtcaaagcacatgtcttccaatgttttcaaaggaacgggccttttttcacaagctttaattaacccgcgcagcattttttcacggctgaattcttcccggacgccttcttttttcacgacgatcagaggcatctcttcaaacttctcaaatgtagtgaagcggtaatggcaggcttcgcattcccgccttctgcggattgatttcccttcgtccgcaggccgtgaatcaagtacgcgggaaccgttatgctggcatgaaggacatttcaaattggatcagctcccatctgtttcgttgctgtaatgcggttcgcaagcttccggtaaatgcccgccaacgtttctaggatgagcctatttgttgggagagccgatagaccggccttatcttttctattttacaaaaaaaatgcttaaagaaaaagcaatgctgtttttttacattagaaaaggagcatcagcttcaaagcgcgtaatggctttttcagcttagctcccttgtgtttgcgttttgaaaattacagtactttcgcttgtgcctgtttaatctgtacaggccccattcctctcggtatttcaatgttttctcttgtatctgcatgtaatgcgtccgcaatgtaatccgcagccacattaggatccaggtctccacaagtataaacatcaatgcttgcatatccgtgttcaggaaaactgtgaatcgttaaatgtgactcagagataataacgactccgcttacgccttgcggtgcaaatttgtgaaatgcgacctcgcgcacttcagctcctgatttcaaagcagcatttacaaacgttttttcaataaaatccatgtcattgagcttatcaaaatcgcatccccacagctcggagatgacgtgacgccccattgtttccataatcatggacccccttaacaagaattaaaaaagtgaatttccgagaactgacccggccatttaccacgggggaaagttagtccggagaggtcctaaccctttaagtaattccgaagcagtcacgagcaagaagttcacgaaagatagtatactgtgtttaagtttattttgcaaggtgtgttttttgcgaatatgccgttaagggtttttttctaacaaatgtccatgatctttagtctacacagctgacgggtgtttcattcgcgcggcgacgtgacggataagatcaacgacccggcaggaatatccccattcattgtcataccaggcgagcacctttacttttcggtcttccatcaccatcgttgtcagtccgtcgatgatcgcagagtgtgaattcgtattataatccgaagaaacgagcggctcatccgaataatcaagaattccgtacatcgacgtttttgaggctctttggaaagcggcgttcacttgctcggccgacacatctgttttcagatcgcagacaaggtccactaatgacacattcggaacgggaacacgcaaagcgagaccgtgaagttttcctttcaaatgaggcagcacgagcgacagcgctttagcggcgcctgtagaagtcggaatgatggattctccgcacgctctcgccctccgcagatctttatgcggattgtcgatatttttttgatcattcgtgtaagcgtgaacagtcgtcatcagcccgctttcaatcccgaattcctgatcaagcactttgacgaccggcgcaagacagtttgtcgtgcaggatgcatttgaaataatgacatgttcatcgggattgaactgctcttcatttactcccatgacaatggtaacgtcttcatttttgcccggagccgttaaaatgacttttttcgcccctgcttcaatatggctcatcgctttttcttttgaattaaatttccccgttgcctctacgacgatgtctattccgcattctttccacggaagctctctcgggtcccggcgattgaacagcataatatgttttccgttgacgatcaggctgtcgtcggcggtctcaacttcttgatggtatttgccgtgaattgtgtcatactttatcaaatgagcaagcgtttccgggggatagcttgcattaatggctgttatttgaatttgatcatcttccattgcttttctgaacaccattcttccgattcttccaaacccgtttattgctacttttaccttcatgctcaggtcacccctttttaatatgccactctaatttacctttatttatatatagtataacacattaaaagaaatccgccagtacaacttgataaaaatccacccttataccgatcaatatgttgttcaatcggtttttttgcatataaaatgatttttcttccataaaaaaagcaggatcagcgtctcaggctgcctgcttttttcttatatttgtcccggttctttaaatttgtcattcaaaatgctgtcctctaaaacggaagacacctcgccgtaccgtttagcaatatgcatcgcgccccagtcacacagcgcatttaaaattctttccagactgtgcccgtattcactcagctcgtattccactttcggcggcacctgattgtacacgatccggttgatgacgccgtcagcttccagctcccgcaattgctgtgtcagcatcttctgggtgatgtccggcataagccgcttcaattcgcttgtccgttttttcccgcgcatgaggtggcagaggatcacacacttccattttccgccgatcacttcaagcgccgcctctacggatatattgtattttttcttcagcaacggtaattcctcctcatctataggaactaaaaagtgcctatggcacttaaaagtacgttcttttcaatgacacttctatcaatcataatgacatttgccggctgaaaaggaatgtactcttatacttatatcgtttacccggcatcatttcaaccatacattatcgtttaaggaggaaaacagatgtcttcacatcgccaaagctatttaccagcgctgctggcattagccgtcagcgcttttgcgatcggcacaaccgaatttatcagcgtcggactgctgccgcttatatctcaagatctgcatatacctgtgacaacggcgggacttaccgtttccatgtatgctctgggcgtgacattcggcgcgccggttttaacgtctctcacatccggcatgtcgcggaaaacactgctgctctgggtgatgttgatttttatcgccggaaatacactcgcagcgagcgcttcctcaatcggcgtcttactggcggcacgggtcatttcggctttttcccacggcattttcatgtcaatcggggcaacgatcgccgccaatatcgtgccggagcataaaagagcaagcgcgatttccattatgttcacggggctgacggtggctacggtgaccggcgttccgttcggcacctatctcggccagcaattcggatggagaatcgcatttgccgtgattgtggcggtaggaatcatcgcattcctcacaaacgcgcttctcgttccgtctcatttgcgcaaagggacgaaaaccgcattttccgagcaggtcaaactcgtcacaaacggccggttattgcttttatttattattacagcgttaggctacggcggaacgtttgtcgtgtttacgtatttatctccgcttcttcaggaggtaacgggttttcagaaagaaaccgtcgcggccatcctgctcatttacggaattgcgattgccatcggaaacatgattggcggccgtttatcaaaccggaatccgctgaaagccttgttttatatgttcattgtccaggcagctgtgctgtttgtcctgacttttaccgcgccgtttaaaacagccgggctgatcaccattattttcatggggctgttggcgtttatgaatgtgccggggcttcaggtatatgtcgtgatgctgagtgaacgttttgcgccaagcgccgttgatacagcatcagccttaaatatcgcggcatttaatgccggaatcgcgatcggctcgtttgccggcggaatcattacagactcaatcggaatcattcataccgcttggatcggggcgctgatggtgctcagcgcggtcgtattaaccggatggagcaggaagctggaaaagcgggatcgcactgcccttgaaaggaggtgagtttttcttcagcgcattttgatttttttcgacagacaaataataggaggaatatatacatgacaacacatttacaagcaaaagcaacattgcataacggagtagagatgccttggttcggcatcggagttttcaaagtagaggaaggcgcggaactcgtcaacgcggtgaaaacggcattggtgcacggctatcgcagcgttgataccgccgcgatttacggaaatgaagaaggtgtcggcgaagggatccgccaagggctgcaagaagcgggattaaaacgtgaagacatttttgtcacgtcaaaagtatggaatgccgatttaggatatgaagaaacgttaaaagcgtttgacacaagcttagaaaaactcggtttagattatttagatttatatttgatccattggcctgtcgaaggaaagtacatcgatgcgtggcgggcgctcgaaaccctctaccgggatggacgcattaaggcgatcggggtcagcaatttccaaattcaccacctgaaacatctcatgaaagaaacggaaatcaagccgatgatcaaccaggtggagtaccacccgcgcctgacacagaaagaactgcttgctttctgcactgaacaaggcattcagcttgaagcgtggtcgccattgatgcaagggcagctgcttgatcaccccgtattacaggagattgctgagaaatacggcaaatcagccgctcaagtgattttgcgctgggatttgcaaaacggtgtcatcaccattccgaaatcaactaaaaaacaccgtattgaagaaaatgcaaatgtctttgatttcgaactgtcagctgaagatatgaagcggattgatgatctgaacgaaaatctccgtgtcggtccggaccctgacaattttgatttttaaccagaaaaacaccgttcggctttccgaacggtgtttgtttatgcccagccgctcaatacttcctcaagctggtgctttgtatattcaagactgccgctgttatcaatgacggcgtcagctttttttgctttgtccgctaaaggcatttgcgacgttatccggctcatcgcttcttcttctgtcagggaattccgctccatcagccgtttgagctgaatgtctgccggtacggtgacgacgagcactttgccgacaagataatcaagcccgctttcatacaaaagcggtatatccaaaacgacgaactgctcttttctcgcaatggcttcatcccgctgtttcagcatttccgcacgcactgccggatgaacgatctgattcagcttcagacgcttctgttcgtcagtgaaaacgatagaaccgagtttttttctgtcaatatcgccattttccagcaggatgtcttttccgaatgcttccacaatttgtccgtaagccggcattcctttttccaccgcctgtttcgcgatgacatccgcatcaatgactgttatttttttgtcgatcagcatacgcgctaccgtgcttttgccgcttgcgatgcctcccgttaaaccgatgaccaagctcaaaaagcccactccttcttacattttccaaatcccgatgataatcagcaggactcccggcaaaaatgtcattttatctatccaattccaccttgaaagcaaatgccccgcgtttatgccgagtgaaacaaacagcgagctcatcaccccgacagtcacgctcatcataaccggagaaaagccgagaatggccgctcccagcccggcgccaaacgcgtcaatggataaggcgataccgagcagaagcgcctcgactccgttaatggttccggattgatcaatatcggcgctggtcggttttttcaaaatatgaatgacgatgccgagcgatttcacttcaagattaagcagcgttttttcatgcaataagtaatccggctctttagccggtttaaaaaattgccagatgacccatgcccctattccgattaagatcagcccgcccagtttctccgtgacggatacaggaaaaatctttgtcagaaaatggccgatcagcatggatataaacatcacagaggctgaacagcaggcgatcacggcaatcgctttgaacgggattttcatttttctcaaaccgtacgtaaacccgactgaaaaactgtccaagctgacagcaaaagccaaaagcagcaaagaaacaatctccatatccgtttctccctttctcttgatcggcaattgtgacatatgcctattgggtgaatcacaatatatatatggagaaaggtcatcaactgtgttagaaaaaagtcattctgctgccgcctgcttgaacagcttcagtttatgattttttttggcagcgggcgcaaaaatgagtgcccctcccgccgaccacgattttagaaatcatcgtgccgcacgttttgcacggttcatcctttttgccgtagacgtaatgtttgagctgaaacattccgatctccccttgagaattgatataagaccggacggtgctcccgcccgcgtcaatcgcttcctgaagggtgtctttaatttctgtatgaagcgtttttatctgcccgtccgacagactgttcgcttttgtttcaggatgaatacgcgcccggaataaagcttcatcgacataaatattgccgaggccgacgaccgctttttggtcgagcagggcggtttttaccgcgcggttcgtttttgcaagccgctcttttaaataagcggcggtaaatgcttcatcatcgggttcgggcccgagctgtgaaagcggtaatgcattccgttcctctcccggcgcaaacaaatgcatcgtgccgaatttccggacatcccggtagcggagctgtgttccgtccgtcatgtgaaacacgacgtgcacatgtttatcgtcaggctcatcggcctgatgaagaccgtatttcccctccatacgcaggtgtgacaccatgacataatgatccaaatggaaaagcaaaaactttccccttcttccgatggatcggatcgtttctcctgcaatctgccgcgcgaattcctccggctcggcgggttttttgatgatattcggccatctgatatccgccgattcaatcgttttccccttcacaagaccggtcagagtgcgccggaccgtttcaacttctggtaattccggcacaatcatcacttcctttttttctgtttattttgcatcgtaccaagacggccctgaagcataatccgccttcagcggcacgtctaatgccaaagcatgctccatcacttcaggaaccagcttctctaatatttcaatttcttccttaggcgcttcaaaaattaattcatcgtgcacctgaagcaacagtcgcgccttcaggtttttttctttcagctcagctgccatgtcaatcatggcttttttaataatatcggcggcgcttccctgaatcggcgtattcatggccgtccgttccgcaaagctccgcaggttgaagttgcggctggtcagctcagggatatagcggcggcgctgcataagtgtcgtcacatatcctttttgtttcgcttcctgcaccgattcttccatatacgccttgacgcccgggaagctctccaaatagcggtcaataaaagcgcccgcttctttccgggtgatgccgaggttttgcgacagcccgtaatcactgatgccgtaaacgatgccgaaattgacggcctttgcctggcggcgcatcgcttgtgtcacttcatcttcactgacatgaaacacgtccatggcggtttttgtgtgaatgtccatatcattcgtaaacgcttcgatcagattttcatcttttgaaatatgcgcaagcacccttaattcaatttgtgaataatcggcggcgaaaataagccagtccggttcggacggtacgaaagcctgacggattttccgcccttcctccagccggatcggaatattctgcaggttcggatccgttgagctgaggcgtccggtttgagtcaatgcctgattgaatcgtgtatgcaccttatgagaacccttgcgcgtgactttcagcagcccttcaatataagtcgattggagtttgccgatttgtctgtattgcagaatgtacgcgacgatatcatgtttgtctgcgagcttctcaagcacatcagctgaagtggaatagcctgtttttgttttctttactggcggcaggccgagtttttcaaacagaatgacgccgagctgttttggtgaattgatgttaaacggctcaccggcgatgtcatggattttttcttcatattctttcagttttgccttgagctcttctcccattcgcttcagtctttccacatccactttgacgcccattgattccatttctccgagaattagcgcaagcgggagttcaagatcttcataaagctcaagctgattattttcttccaaagcgtcaagcagtttgtcacggaggctgttaacggcagacgctttccgcgcgagatgatcggcaagctctttttcagcgggaacggcgcgttttgcgccttttccgtataccgcttcatcttttgaaacgatattcagcccgtattctttcgctacgctcgcgacatcgtcgtacgaattgcccgggtttataatgtaggcagcaagaagcgcgtcaaattccgttcccttcagctcaattccctgccagcgcaaagcgacgacggaacgtttgctgtcgaacacccactttttcatcgattcatcttcagcccaagatttaaaagcttcagactgaatggcgatttctttcggaatataataaagacctgtttcattcacgatggaaaagccgaggatcggttcttcgtgatagttatcaccgatttgttcgacgaccaaagcggacggcgaaacgagcatatcttcggtgatttcttctgctgtttcgacattgatgtcttcaaaattttcttccgccgtttccccgctttcttcaccgagccgctcaagaagcgtattaaaaccgaggtctttaaaaatggcaacaacttgttcacggtcaaacccttggtaatctaaatcttcgggcttgacttcaatcggcgcatttgtcataatcgtcgccagctctttgctcatcagggcttgttccttatattcttcaagcttttcttttaatttttttccgctgacttcatcaatggaatcaagcagtttctcaaccgaatggaactgctttaagagcttaatcgcggttttttctccgacgccggggacgcccggtatgttatcggatgaatctcccattaatcccttcatatcaatgatttgcaaaggagtcagaccgtacttttcccgcacgtgctccggcgtgtaatcttctacgtcggtaatgccttttctcgtaatggcaacggtcgttttcccggttgcaagctgggttaagtccttgtcccccgaaacgaccttcacttcaaagccgtctttttcagcagatacggcaagcgtgccgataatatcgtccgcttcatattcaggaagctcgtagcggctgatgttgtaggcatcgaggagctcgcggatgaacggcatctgttctgaaagctccggcggcgttttttgtcttccgcctttatattctttaaacgtgctgtggcggaaagtggtttttcccgcatcaaaagccaccagcatatgggtcggtttttcatcttccagcattttcattaaaatcatcgcaaacccgtatacggcatttgtatgaatgcctttttcattgcttaaaagcggcaatgcaaaaaacgcccggtacgccagactgtttccgtcgacaagcactaatttttttcgttccgtcattcaatatcctcctaagagcaaaagctcgtcattcctctgttttttaatctcacagcttctcttattttaacaaagttcaatttgaaaggaaaatgagcggaccccgtgaaaacgcaaaaaaggacgggaacaagaaaacgcgttcccgccgtcaaaattggctccttggatgaaggggttctgttatatcctaacaagataggtttaacaggtcatgaagaaattgttaatcctttgtaaagctgatcacgctgccggcggccgcttcagcgtcacagtgaacacagttccctgtccaggctcgcttgtgacctcgattttaccttcatgggcttctattaagtgcttcacaatggcgaggccgaggccggttcctcccgagttgcggcttctgtctttatccacgcggtagaatctctcaaatatccgcgggatctcttctttctgaatgccgattcccgtatcggacactttgatatcgacaacggtttctttcacatgtaccgaaatccccaccgtccctttttcaggcgtgtaggtcagggcattgttcgccagattcaaaaatacctgcttcagcctgtgcgcatcacccgtcacaaaaatcggctcttccgggagatcgagctgaaagctgatgcctttttcctcagccttatgctgcaaaagcgcctcaatttcatgcagaatttttgcagcatcaaaggactctacgcgcatcgtaaagttttgctgctccatcttggataaatccaataaatcctgcacgagagattggagccgctcactttctttcagaatgatagacagaaagtctgaaagcgccttttcgtctttcatcgctccgtctaacagtgtttccgtaaatcctttaatcgaggtgatcggtgttttcagttcatgggagacattggcgacgaagtcctttctcatctgctccaattttttaatttccgtcatatcgtgaaaaacgaggacgatgcccttccattcatcatcagggcccatgatcggaacgccgtcaacttcaaagtagcgccgctcaatgttgatgggaagtctgagcagctggcattttttcgtctccgtcataaaaatgtcttcgacaagccgaatgatctcctcatgttcaaacgcatcgtggtaaaggcgccgaagcagacgttcaggctttgtatgaaactgcttcgtgtatgaccggttcacgagattgataaaacctctcccgtctattaaaatcaaaccggatccgatattttcaatgacggttaacagacgatcgcgctgcatatcctgcgttcttgtcatttccattaaatcgaccgccaggctgttcatcgcacgcccgagacggtccgaccgccttgcgtaaccgctgtaggagcgggcgtcgtaattccctttggacagctccgtcgccacctttgtcgcggcgtcgattgattttttgtaacgcgacgtcatgtttgtataaaagaaaacgataatgataaaagcggtacaaagacttgctgccagcatgccccacatttctccggtaacgcttgaaccgccgttgatatccgaggaaacgagtacataccccgcaattttccctgcgtcattttttacggcagtgccgcggatgactctgcttttcgactgtacggcttcctcgcttttattgtgagaaatgaactcctttacggctgaatcatcagcacgactgccggaatgatatacggcgtcacccttctcgttgagcaaggagacgtttataccgagggtgcggccggcgtcacggattaccgtttcattgcttttattgccgattcggccggtgtcaagaaggcccgctatgtataccgattcctttttcagctgatccgccgttctttcttcagcggatgaagaaataagctgctgtaaaaaaaggccgagaacactgaaaaccaatatgatacatacaacgagtaaagcgaacagacgcacacggactttattcattcatttttggctcctccagtttataccccaaacctctgattgttttaatatagatgggttttttggtatttgattcgattttgtcgcgcagatggctgatatgaacgtcaacaatccgggtatccccggcaaaatcatagttccagaccgcgctcagcagaagatctctcgtcagcactcttcccttgtgttttcccaaatacagaagcagttcaaattctttaggcgtcaattccagctgttctgacttgaagtacgcttcgtaatgctccggaagaattttcagctcgccgatgaggatctgcccgtccttttcctcttctctgccttgtgacagcgaagaaatgtcagcccttcttaaaatggctttcacccgcgcagtgacttcccgcggactgaacggctttgtcatgtaatcatccgctccgagctccagtcccagcaccttatcaaattcctcatcttttgctgtcagcatcaagatcggaaccatcattttctgctgtctgagctgtttacagacgtcgattccgtccactttcggcagcatgacatccagtacgattaaatccggattttcattctctgccagctccagagcctcttcgccgtctgatgcggttatgacatcatagccggaccgttccagattatactgtaaaagagtaacgatagattgttcatcatctacaactaaaatttttttgttcatgctgcgccctccgctgtctattttccccgacatccaattttctctattttatgtgctgcatatcactttatgatttcattttatccaatactgcccgttcagacaattcgcctttttgatcattttcagagaaaggatcgctcagggaaaaagaaaacgctttcattaattgtaaaaagaggaaggcttctgattcggaagccttcccttttttcttatgacaatactttcatcacgtttttgacagattcaactgatttactcagctgcgctttttcatagtctgtcagttcaagctcgatgatttgctccaggccgtttcctccgataatcgtcggtacgcctaagtaaatgccttcatgaccgtattcgccttctaagtaagcgatggtcggaagcacgcggcgctgatctttcaaaatggcttctaccatttcagtcagtgatgcagcaggcgcgtagtaggcgcttccgtttccgagaaggttgacgatttccccgccgccttttcttgtgcgttctacaatcgcatcaagacggtctttcgggataagcgtttcaagcggaatgccgcccgcataggaataacggacgagaggaaccatgtcgtcaccgtgtccgccaagaacaaaaccggtcacatcttttacagacaggtttaattcttcagcgacgaatgttctgaatcgcgcagtgtcaagcactccggattgtccgatgacgcgttctttcgggaagcctgattctttgtacaccgcatatgtcatcgcatcaacagggtttgtcaatacaacgataatgcagtcaggagaatatttcacgatctcacgtgtgacgcttctcatgattttttcgtttgtagatacgagatcatcacggctcatgcctggttttctcgcaattccggctgtgatgacgacgatatcagaaccggctgtgtcctcgtagttggacgtgcctgtgattttcgcgtcaaatccttgaaccggacttgcttcgagcatgtctagcgcttttccttttgtcgggttttctaattgcggaatatcaacgagcacaacgtccgcaagctctttttgagctgtaagaaaggctgttgtcgctcccgtaaatcctgctccgataacagaaactttactgcgtgtttttcccatgattctcttctccttttttggcttcattagaagtctgctttaggttcagtccatgtttttgatgagctcttcaccgaactctgaacatttcacttcagttgcaccgtccattaatctagcaaaatcgtacgttactacttttgaagcaatcgttttttccatagatttaatgatcaagtcagcagcctcattccagttcaggtgttcaagaagaagcactcctgaaaggatgacggatgacgggttgaccttgtcaaggccggcatatttaggagccgttccgtgagtcgcttcgaaaatcgcatgccctgtttcatagttgatgttcgctcccggcgcgattccgattccgcctacctgagcggcaagcgcatcagagatatagtctccgtttaagttcattgtcgccacgacgtcgaattcgctcggacgggtcaagatctgctgaaggaaaatatcagcgatgctgtctttgacgatgatttttcctgccgcttccgcttcgctctgcgctttatcagccgcttcttttccgtctttttcgacaatgcggtcatattcagcccaagtgaatactttatctccgtattctctttcggcaagctcgtagccccagtttttaaatgccccttcagtgaacttcataatgtttcctttgtggacaagcgtgacagacttacggccgttttcgatcgcatactcaatggcagctctgactaagcggcttgtgccttcttcagaaacaggcttgatcccgattcctgacgtttcagggaaacggattttgttaacgcccatttcattttgcaggaagctgatcagcttttcaacttcttcagaacctttcgcatactcaattccggcgtaaatatcttccgtattctcgcggaaaatgaccatatccgtatcttcaggacgtttgaccggagaaggcactcccgtgaaatatctgacagggcgcaggcacgtaaacaaatcaagctcctgtctcagcgccacgttcagagaacggataccgccgccgaccggcgtcgtcagaggacctttgatggcgatgaagtactctctgatgtcttccagtgtttcggcaggaagccactcacctgttttattataagccttttcaccggcataaacttctttccacgtgatttttttctcgcctttatatgctttttcaacagcggcttccaatactttagaagcggcattccaaatatcagggcctgtgccgtcgccttcaataaacgggataatcggattatttggtacgtttaatactccattagagactgtaattttttcaccttgtgacacaatattacctcccagtatgtaattcatatttagaaaacattttatttttcttgtataaaaaataaaatgacttttctcaagattctatcaaaattgtaaaccaatccgggcttgattaacaagaggctaacgacatgaaaatcaccagcctcccgtttgatcaggctctttcatcaagcggaacaaaagtctgcttatccggacccgtgtaatcagcgcgcgggcggatgaggcggttgttatcgtattgttcaagaatatgggcgatccatcctgacattctgctgaccgcaaagatcggcgtgaacagatcgtgatcaatgccgagactgtggtagacagatgcggaatagaaatcaacgttaggcggaagttttttctccgacgtcacgatttcttcgacacggattgacatctcgtaccatttgctttcacccgtcagattcgtcaggcgtttgctcatttcttttaagtgtttggcgcgcgggtctccatgcttatacacacggtgtccgaagcccattactttttcctttttctccattttgctgcggatataaggctcggcgttttccacttcgccgatttctgtcagcattttcatgacggcttcattggctccgccgtgaagcggtccttttaaagcgccgattgcggcagtgatgcctgagtaaatatcagataaggtggcgacacatactctcgccgtaaatgttgatgcattcagctcatgatccgcatgaagaatgagcgctttgttaaacgcttccacttcgatcggagaaggctcttcaccgtttaaggtgtaaaggaagttctccgcgattccgtactcttccttcggttcaacaggatcaagtcctttgcggattcttgagaaagcggcgacaatgcccggcactttcgcctgcagacggatggcttttctgtagttcgcttccggattcatgacatcggcttcactgtcagtcagaccgagtaatgaaatcgccgtccggagcgcagccattggatgtacgttattgaggggataggatttgaagtgctcaatgatttcttgtggaacggcagcttctttcgcaagctgttttttcagttcagcaagttccgttttattcggcaggcgcagatgccacagcaaataaatgatttcttcaaaacttgcattctctgtcaagtcgtcaatatcgtaccctacatatgtaagggtatcgtcgataatagagcttacagatgatgttgttgctacaaccccttcaagaccgcgtgttgctgtcatattcaacctctccttttcaatcaaaattcccctttaaagagtatataaaacatacggcttacttaaaatgagtcatgcaaacaatccctttcccctttaagaaaatgcttacatttcactggttgcggttacataaccggtatgcttatagaggaacataacaaattcttataagcttatttaagtttaagcctattcttattataaacaataatctgattaatttgtagacttttaactaaaaatgttttaaaagccctatatatcaaggcttggcgttgataaatttaatcgcttgctttcagatgctttgtaaaaccatgtattctcatgttttcatttggggggagctttggggaaactttaaaaggacaggcgcaacaacttcaccgcaaatccctccttctttaccggagaaggggggattttgtttactcgactgaatcaatgttcggatcagcttcggaaatccatgtcttggttttagttggctccccgtacatggactggaatcgtttgactgcatttgcgctgttgtcggcccgtaaatatcctcatcaaaccgttcatcaattgaaactgactcatttactgatgtaggtgaagttaaataaatgcagaaaaaccctcctcatctcgagaagggctcgatttctgcttcttttttctaaatcagtccgaagaaaaaactgatgccgctcaactttttaatcgaagggcttcgggttctccaactatttgcccctatgcttttcttttgctttttgttttctgattaaatatttttgttcctttattttttctctttgttttctgttcagttgttttttcttttcttttcttgcttcaagctcctgttttatcgctttttgcgccttagttgatatcccgatatttttcatctctttagaagcttgccgttgtaatctttttgggtttaacttcttagattttgctttaacacaaacccctgtttgttcagtgcgggagagagtctgtaaaagttgattatgaacaaaatgcatgatttctgaatccttgggctcttttccaaacaaatgacgaactgctcttaatttcccatcattcacaacttcaatgactcctacccaaaactgaccatcgtagtaaaccgttaatttcataacgattccctcctcctaaatttactgaagaatgatggacatcccgaggaggggaaggttactgacattttaaataatgcatccggactaccaaccgaattgtgttttttcattctcattataaatttaacaaactttcaaattgaaggaaagggtctccgcttattttaacaacacttcaagttttgatttggttcaagtgcataaattccatcagcttttaatccattcatcaattggaaccgccttactgcatccgctgtcatcgcacaatatgcgccggcgattccgaagttctttgttacatggtaagccacttcattcctcggaataatgcaaatggcatttgtctgaactacaaaatgccctgcaaactcttattttcacccgcaaaaaaaagcagctttacgccgcttttttactttatgaagtgaatattttaacgatttgcatggccaagtaggcgattccggcgccgattaacgggccgacggcgacgcctccgaaaagcgcgacggcaagtatcgtgccgatgaccagcgccgttgtaatatgagggtcgttttccaataaggtgagaccgtttttggcgattaaggcaaccgcgatcccggcaccgagagcgatccacgcataatatgatttcatcgcttctccgagctgtttaaaaccgatatcacctgtggcaatcggcactaaaacggcgattgtaatgacggtgacccccagttgatgccttttgactgaataaccggaaatagtttctgatcaagaccgacagcttttatcacaatgagaaagccgacggcaaaaagcaatgactgatttttggctaccaatgcgatggccagcaataatagtaaaaataaattcgcctgtgtaaacatcctgaaagcaccctctttcatcatatctgtaatcatatccttttttttgacgaataaactaatgtaataggacgtgccgaccgagaggaggatcgatgtgaatccgcactatgcaactgtttttttccgcgcgctgtttgtactcgctgcggccggcggcgctttagcggccggttacgcctcatttccgttaacttatccgtttctgatcgcccttattctgtcatcagcgatcattcccgttgttgactggctggacaaactgacggggctgccccggtcagtcaatacagtcattgtcctggtcttctttttgcttattcttctcggcgcggcaacatttctcgttgcggaaatcatttcgggaaccgcctatctggccaaaacgctccctccccatatcagcgcctttatgacgtattgcgaagagctgttcacttcccgcattcagccattgtaccacgagctgaccgtcctatttaacgggctggaaaccaatcagcaggcttccatcgtgacgcatattcagaccctcggtgatacagccgctaaaaatgcggggctcatgctttcacatcttttggagctggtgccgaaatggattgccttccttcccaatacagctgccgtcttcattttcgcaatgctggcgactttttttatgacaaaggactggcataagctgaaggcgctgctttattccatttttccggaacgggtttcggcaaacgccaaggccgtatcgggagagctgaaaaaagcgatggcaggtttcattaaggcgcaggccgtgctcatacttttcacgatgatcattgtctttatcggactttttcttttagggattgagcatgcggcaaccatcgccttttttatcggcctggttgatctgctcccgtatctcggcgccgggtcggtctttgttccctggattatgtatttggccattgccggtcagcttcctcaagcgatcggtctcggtgttttatatattgtggttctcattcagcgccagctgacggagccgaaaattttaagcaagtcaatcggacttgatccgcttgcgaccttaatcgccctgtttgccggctttaaattgttcggaattttaggactggctgccgggcccgcgctgctcgttttcattcaggcctttatcacaacgggcgctctaaaagaaatatgggcctatattactgttcaatccaaataaaaacagcagccctgtaagaaggctgccgttttttatttgataatgatccgcttgttttttgacatccctctcagccatttgaacaaaaacggcttcatgcggttccgagtgaacggaatcagaagacaggcccctgcaatatcggacagaaaacccggaagcatcaaaagcaggcctccgaaaaagacgcatattccgtcaagaagcgcttcccccggcattttgccgtgctgcaggtcgcgcatcacccgatgatacacatcggttccctgtctttttgccaccaaagcgcctaacacgcctgtcaaaatgatgagaaggaaggtcggaaaaataccgagccattttcccgccagcagaaacaaaccgatttcaattgccggacatacgataaacagtaagaataacactctcatttttctgccctcctgcccttctaaaagcgcgtcaccgcccgcatgggaataggaaaatcaacctaaagacaaaagagaagggagaacccccctctcttttttaaagctgtttaaagaacgcttgcgcggccttcatacacagcgccgcgggcagcgtcaactgtgataacctgtccttctgttaaaactgaagttgcgttctcaaggccgacgataaccggaatgcccaagcttaaaccgacaacggctgcatggcttgtcagaccgccttcttcagtgatgagcgctgatgctttttcaagtgaagcgatcatgtcgcggtcagtgcttgaagcaaccaatactgcgccgtctgtcattttttgttcagcttctttcgcattttttgcaacaacgaccggaccgaatgcagatttgcgtccgatgccttgccctttcgcgataatgctgccgacagtgtggactttcatcagattcgtcgtgcctgattcaccgacagaacctgctgtaatgacaatcagatcaccgcgtttcacgatgccgctgtcaagtgatttttgaaccgcgtcttcaagcatttcatctgtagaattcgcgttttggccgcttgacgggaatacaccgaatacaaggccgagtttgcgtgatacagactcattaaccgtaacggctacaatcggagcctgcggacggtatttcgcgatcatacgcgccgtatggccgctttctgtaggcgtcacgatagctgccgcactcagattgatcgccgtgtgcgcaactgattggccgatcgcatcagtaatcgtcatgccgacctgatctctgcgtttagacagaatttctttatagttcagagattcttccgtgcgtgtggcgatgttaaacattgtttgaaccgcctcaacaggatattgtcccgcagccgtctcaccggaaagcatgatcgcatctgtgccgtcgaaaatggcgttggcaacgtcacttgcttcagcacgtgtcggacgagggttgcgctgcatgctgtctagcatttgtgtcgcagtaataaccggtttgcccagcgcgttgcattttttgatcatttctttttgcacgagcggcacttcttcggccggaatctctacgccgaggtctccgcgcgctaccattaggccgtcagatacttccaggatcgcatccaggttgtccacgccttcctggttctcgatcttaggaatgatttgaatgtcagacgcgttatgctcttcaagcagttcgcggatttccaggacatccgtagaacggcgtacaaatgacgcagcgatgaaatcaacgccttgctcgataccgaatatgatgtctttggcgtctttttcagtaattccgggaaggttgacgctgacgccgggaacgtttacgccttttttatttttcagcgtgccgctgtttaagatttttgttttgatttcgtgtttttccggatttgattccagcacttccaatccgattaaaccgtcatccagcaggatgatagaccctgctgacacgtcgtctgccaggccttcataagaaactgagaatttttcaagcgttcccagcacctgtttcgtagaaacgataatttcatttcccgcctgaagctcaagcgcgccgttttccatatcgtgcgtgcggatttccggacctttcgtatcgaggagaatccccacgtttttgccgagctttttgctggcttctctgatgtttttgattcttgcgccgtgctcttcgaaatcaccgtgtgaaaaattcagacgagcaacgttcatacccgcttccatcaattttgtcagcatttctacactttcactggccggaccgattgtacaaacgatttttgtttttttcaactcgttcacttccttctgaaatcttcagcttcttccgccttaaatagacagttcttttgaaagctgatacatgtttggttcaacagtatgttttgattctaaaatttctataatatcatggtctacaagcttgttgttttgtatacctacgcagcgtccgccttttcctttaagcagaagctcaaccgcgtaagcgccgaggcggcttgcaagaacccggtcagaagcgcttggagatccgccgcgctggatgtgccctaaaacggatacccgtgtttcaaggttcgtttcttcttcgatgcgttttccgaattcaaccccgctgcctaccccttctgcaacgatgatgatactgtgttttttgccgcggtcgtgccctctcttcaaacggccgataatttcctccatatcgtagtccgcttcaggaattaagattgattccgctccgcctgcaagacctgcccataaagcaatgtcgcccgcatggcgccccatcacttcaataacgtatgtacgctcatgagacgtagcggtgtcacggattttatcaatcgcatcaattacggtgtttaacgccgtatcaaatccgatcgtaaaatcagttcccgggatgtcattatctatcgtacccggtacacctacacacggaaacccgtgttccgttaattttttcgcacccatgtatgaaccgtctccgccgatgacgacaagaccttcaatgccgagtttctttaaattttcgattcctttttcacggccttcaactgttttgaattcaggacatctggccgtatacagctttgttccgccgcggtggatgatgtcaccgaccgaacccagctccagtttttctatttttccgctgattaatcctgaataaccgttataaattccgtacacttcgacgtcgtggtagatagctttccgcacaaccgcgcgcaccgcagcgttcatacccggggaatccccgccgctcgttaaaactcctatacgcttcatttcctattcacctcagcaactatatatgttaaacatatcatgatcattgccctaaaacaatgaaaagggacgcctgagctcccatgaaaccttacctattatacaattaaataaattgtttttaaataaaatttaaggaatatcacaaaaatcacaaaaaataaacgtgagccataggcttcacgtctattcagtttaccccgatatattgatcctcaaccgaaactttcccgattgctttatatttttcatagcgctgtgagatcaactcttcggcgttcaatcgaagaagagattttaacgtttctttaagaataccgtcaatgtagcccgcctgctgcttgatatcatggtgagctccgcccttcacttctttaatcatatcatcaataattcctaattctaataaatcgggcgcagtaatcttcatggtttcggccgcttttttcgcaaggctggagtctttccacaaaatggacgcggctccttcaggagaaataacggaatacgtcgagttctcaagcatcagcatgcggttgcccacacctaacgcaagcgcgcctccgctgccgccttccccgatgacgatacaaacgacaggcactgtcaggccggccatctcgaacaggttcttggcgatggcttcactttgtccccgttcctccgccgctttacccgggtacgctcctttcgtgtcgatgaagcagataatcgggcggttgaacttatccgcctgcttcatgagacgaagcgctttgcggtagccctcagggtgaggcatcccgaaattgcggacaaggttttctttcgtgtcttttccgcgctgatgtccgatgacggtgaccggcatgccgtgatatttggcgactccgccgacaatcgcagcatcatctccgtatgttctgtctccgtgacactcaaaaaagtcggtaaacaggtattgaatgtaatcaagcgtcgtcggccggtcgggaaggcgtgcgatctgcactctgtcccacggcttcagatttttataaatctcatcctggagcttgctgagccggtcttcaagccttgcgatttcagcgcttaaatccatctccgaatcttgggtgaattttttcagttcggcaattttcgtctgcagttcaatcaccggtttttcaaattctaatcttgcagccactcatgctcacctcctgtttggtgcatgtccagcagaaatgcgagtttctctttcatgtcgtttcggtgaatcaccgcatcaagctggccgtgctttaataaaaattccgccgtctggaaatcttccggcagtttttccccgatcgtctgttcaataatacgtcttcctgcaaatccgatcaaggcgcccggttcagcgaaattataatcaccgagagacgcgaaactggccgatacgccgcctgtcgtcgggtgggtcatgacagaaataatcagtccctgctcctcactgaacagttttaatgcagagcttgtctttgccatttgcataagacttaagaccccttcctgcatacgtgcgccgccggaagcggtaaagatgataaacgggactttttcctcttttgctttttcaattgcaagcgtgattttttcgccgacaaccgaacccatgctgcccattcggaatgttgaatccatgatcgcgatcacggcagggaatccgctgatggttccttttccggtaaccaccgcttcattcagcgatgttttctcacggtctttttcgattttttctaagtattccgggaaaccgagcgggttttcagatatcattccctggttgaattcttcgaatgaatcttcatccaggaggctttcaatgcgctgctttgcattcatcgggaaatggtgcccgcagttcatgcagacgcgcaggtttttatctaactcttttgtgagcatgatttttttacatttggggcactttgtcataatgccttccggaacatcatgttttgcctgctcagacggcacggaagcatattttttcttttttgtgaatatatcctttaacaaatgattacctcccttttgtgaagggttctcttcactgcatgtcttccgattagatagacttaataataactttaccgaaactattgtactttttttgtcaaacggtgtcatcctccattcgacattttttgctgcaaaacagacggaaacggacggatttcataccgtaaaaagcgttgttcagccttatctgtcagcgttttcaaaagaaataaggattctgctgaaatttttttaagacctgcccttaaaaaaatgccagcagtccgtatattgaacagcagcgcgttgttttttccaacgcgctgccatttcatttttgtgttattattccccgatgactgtgagctgtcttgttttttcagccacttcttcaggatcgaccgtaattctggcgacgcccgtttccatcgctgctttcgcaacagctttcgcaacggcaggagccacgcgtttgtcaaacggagccgggatgacataatcagcgcttaattcttcctctgaaacaagggaagcaatcgcttcaaccgcagcaattttcatttcttcgttgatgtgagtcgcgcgaacgtcaagcgccccgcggaaaattccagggaatgccagcacgttgttaacctggttcgggaaatcagaacggcctgttccgattacgctagcgccggctgcgcgcgcgtcttcaggcatgatttccggattcgggttggccattgcgaagataatcggatctttcgccatgctctccaccatttctttcgtcagcgcgccttcgactgatacgccgataaagacgtctgcatctttaatgacatcctgcagcgagccatcgttgcggtcttggtttgtaaacttggccacttcgtttttcaccgcgttcatgccggccggacgcccttcgtaaatcgctcctttagagtcgcacatcacgatgtcgcgtacgccgaaatggtaaagaagcttaatgatcgcgatgcctgccgctcccgctccgtttgccacaactttaatggatgacatggattttcctgataatttcagcgcgtttacaagtccggcaacggttacgatggcagtgccgtgctgatcatcgtggaaaaccggaatgtttgtttcttttttcaggcgctcttcgataatgaagcagttcggcgccgcaatatcttcaaggttgacacctccgaatgtcggttcaagcagcttcacagtgtcaatgattttgtccacatcgtttgtgtcaagcgcgatcgggaatgcatccacgcccgcgaaacttttaaacagcaccgctttcccttccatgaccggaagtgaagcttcaggcccgatattaccgagaccgagaacggctgatccgtctgttacgactgctaccatgttccccttcattgtataatcatatactttatttttatcgtcataaatctctttacaaggctcagctactccgggagagtaggcaaggcttaagtcgtccgcgtttctgacttctacctttgcttttgattccagctttccttgatttactttgtgtaaatgtaacgcttcttctcttaatgacattctaaacactccttttaagtactttgttacatattctgccgcatagactggtacaatcgctggaggtgaaaaatttcagaatctttaaataagatagcacaattgtttcaattgtataacaaaacgattattgttaccactattttaacacgacgttttcgcggcccagcagctcttttaaacggtataacgcctgatggtccgcctcaatatgaaaagtatccggcagcctgatcgtctgcttgtctttttcataatatagataaacgccggtttcccctttatgctccagtaaaatacgcttcatcttttccaaaaactcctgattgtgccggctgccttcgattttgatgtaaacagacggcgctctgtctgcctccgtctgttcaagaagagaggcggatgacatgatgaattgtgtcttctcctgacgctcttccatttttccggcggcgaataaaagcgcgccttcttttaacagcggagacagccttctatattggtcaggaaacacgacggcttccatttctcccgtttcatcgcttaatgtgagaaacgccatatgctgacctgtctttgtccgaatcgttttaatgcccgcgagcaaagcgccgattgacagctgtcccttcggcatctgccgcgctgctgtgatcgtttgcgccccccgttttttcaggagatccctgaaagcagacaaaggatggcttgagaaataaacaccgagagcttctttttcgaaccgaagcttgtccacgagcggaaattcctcagcctctacatattttggcttaatggaaaacgattcttccaaaaacaatcccatttggtcatcgtctgcacgaaaaagttcagcgtgctctaaagccacatcaacggaggccagcaaggcggcgcgattttgattgaattcgtccatggcgccagaaaatataagggcttcgatggttttccgattcacgctttttgcaggtacgcgaaagcagaaatcgaaaagatcctcgaacggtttatgtgttcttgctttataaatatctttcactgccgagacgcctacgtttttaacggcccgcaaactgtatctgacggctccgttttccggcgcaaacggaaaaccgcttttgtttattgacggcggaaggacttgaatcccgctccccttcgcttcatgcagatattgcgatattttgtcctcattgccgatgacgctcgtcaacagcccgcacataaaatatagcggataatgcgcctttaaataggcgagctgatagccgatcatgctgtatgcgacagcatggcttctgttgaatccgtagttagcgaattttacaatcagatcgtagacctcgtttgcagtgactacagaatactccttttttaagcacccttcaacaaaatggcttcgctctctgtccagaatgtccttttgctttttgctgacagcccgtctgagcagatccgcttcacctaatgaaaaccctgccatgcgcgaggcgatcatcattatctgttcttgatagacgatgacgccgtaagtgtcactgagaatatttcttacgtcctcgtgcggcacttccacacgcgcccgtccgtgcttccgatcgataaataacggaatattttccatcggtcccggcctgtaaagcgcgttaaccgcgacaatgtcttccagtcttgacggcttcaggcgcttcagcacgtttctcattcctgatgattccagctggaaaatacccgtcgtatcaccgtttgacaatagcgagaacgttttttcatcctgataagaaatctcggaaaaatcaattttcgtattcgtctctttttcaatcatcgttttaatggattcaataagcgtcaggttgcgcaaacctaaaaagtccattttcaaaagaccgagatcttccaggtgatccatcgcatactgcgttaaatacacgccgtcatgcccttcttgaagagggacaacttccgaaagcggctctttactgagaacgaccccggccgcgtgtgttgacgtgtgtctcggaagaccttcgattttccttgcgatctgaaacactttatgaagaacggcggattcggacagccgcctgttcagctgagcggactgccgcctcgcctcctcaagcgtcattcccggtttcgacgggatcaggcgggcaagctggtcggcttctttcgggctgattccgaacactctcccggtatcccttaacgccgcctttgcggccaatgtcccgaaggtgataatctgggcgacgtgcatggccccgtacttattttgtacatactgaatgacctcatcccttctcgtatcagggaaatcgatatcaatatccggcatgctgatccgctcgggattaagaaatctctcaaacagcagagaatgtttaagcggatccacgtcggtaatgaaaagcgagtaagcgacaagcgagcctgccgcggacccccttcccgggcctgtcacaatgcccttttcatgcgcgtacttcataaagtcccatacgatgagaaaataatcactgaatttcatgcgcctgatgacgtccagctcatattcaagccggcggacagcccgctcatcaggagtgccgaaacggagacgcagcccctcatgacagatctccgccaaatagtcatcggctgatttgccgtccggcgccggaaaagacggaagctgtgtctgtccgaggcttacatcgacccggcattgccgggcgatacgggcggccgcttcaatcgcttccggatgccgcgtgtaaagctctgccatttcttcaggcgtcctcaagtataagtccggcagattcccgctctgatcctcccatttctctccggctttaatagcgcacagacagcggtacgcatcttgatcttctttcttgatatagcggacatctcccgcagcgcagacagcgatttccgtctcggctgacaggcggagaatctcttctgataacgtctcatgtcctttaaacggctggtaccctaaataaaaacggccgtctccgaacagctcccggaatccttcggcagcccggaccgcttcttcaaacttcccggcttgaagcaggctttcaatgtacccgttttcaccgggcgtaatggcgatcagcccctcatgatagctcttcatccattttcgcttcatgccgccctttgccatggattgcagcgcacttgagattttcaccaggttctgataaccggtgtttgtctccgctaaaagaatgagcgggtgtgcttcaagctccgtatcgtccgtgtatatagaagccgtcagaccgataatcggcttaattccgtttgatttgcatgctttataaaactcaatggcgccgtacatcacattttcgtccgtcagcgccaatgatgaatatccgagttccttcgcttgtgtaacaagctcttttacagaagcggcgctgtttaacaggctgtagccgctatgtacttgcaggtgaacaaaagacaatgccgccactcctttcccatacgttcattttgtctttctacattataagacgggttttcttaagaaacaaatgttcttttttgactcatcatcatacttgtccgtttcgctcaatatgatagaaaagtgaggtggtgtatatatggatcaggaagccggctttatggcgaatttcatcagcagttattttatcgccctcggtgtgttgctcggcggcgcgctgatcggcggcctcggagcttatttatcaggcgagcctccgctgacggcgatcacaaaattggcgaacaggctgaagatctgggcgcttgtcgcggccatcgggggaacatttgacgcggtatacagtttcgagcgggggctgtttgaaggcaacacgcgcgacatcttcaaacagcttcttttaattatttcagcaatgggcggcgcgcagaccggctggctgattatttcatggctgacccaggagaatatgtcatcatgagaattcccgagtattataaaaaaccgggatggcagcgtttttttgcgggaatgatgtgcggagccatcatcagctggctgttctttctgtttacatacggaacgtttcaggaagaacaggtgacgttaattgaaaagcagcgggagcacgcgcgggatttaaaaaaccaaatctccatctatcagaaagatcttcataaattaaatgaggataataagcaaagacttctcatccaaagtgttgatgtgaagctgattaattgggaaaaatacagaatcgcccagcctgacaagatgaaatttgaggaacaggtgaaagataatatttctgaagtcatcacaaaggatattgaaagcgtgtataaaacaaaggagcttttaaaacggacaattgaaaacaaaatatacaccataaatgagaaggaatttaaagctgaagtaaaggaactgacgatttatacgagattgtctgtcgaaattcatatttcttttgcgacgtaattatgttatttttaaaaattttccatagatctgtcgcttttttctccgcttttttataaactgtagatgagacattttcaacgattctgaagggaggaagggaaaatggaggtttttagtgaacgccgcttggcaaaagatcatgcagcccgaatcagacaaggctattccgcatatgcagaaacagacacactcgcttccctcataaaaaaagaactccaaatctgtaatctccgcgtctacgaagacctgactgaattcggctgctggttcatccccgtgacagatgaacactaagaaagagggtctcccctctacttgtgttcgttacatacctcttccagatcagcaagaatctgatcggtttcatcccagctgaagatggatgcgccggccgcaagcggatgtccgccgccattgtatttccgggcaattccgttgatgaccggaccttttgaacggaaccggactctgatttgatcgtcttcttctacgaaaaacacccaagcgcggatacccgaaatatttccgagtgttccgacaagctgcgacgcttcagaagcggtggttccatatgtctccaaaatgtcttttttaatgaaaacggaagcgacgccgttttcagacagtgacacattttgataaataaagccgttaagcttcaccacatttaattttgtttcatacaattgattgaacagctctgacgatgaaaatgggaactcaatgagctctcccgcgtattttaatgtcttttttgtggtgttcgggaataagaagcgccccgtatcaccgacgataccagcgtagatcagctcagctgctttcgtattcagtttccagccgtgctgctttccttccaggtacagctcatagatcatttcgcttacggagcttgcattcgtatcgacccataacagatcgccatacggatcttcatttggatggtggtctattttcatgagctttgcgccggaatggtagcgctgatcgtcgaccctgccttggtttgcggtgtcgcacacgatgacaagagcatctttataggtttcgtcatccacctcatcgagggaatataaaaaagacaaggacggttcaggctgtccgacggcaaaaatatttttttcgggatacgtttcccgcaggatttctgtaaggccgcactgtgaaccgtaggcatccgggtcaggcctcacatgtctatgtaagataatggtgtcatataatgatatggttctgatcagttcggatttcatcgttttctccttttcgtttttattcatttaatcatactctttatccatggaaaaggaaaatctttcagcaacggtataaacggttttgcaaactcatataatggaggatttcatttatgctggtttttgtttttctcatcgggctttctgcctgcttttacgtgtattacaaagtaaaaggaatccagacgaaacgggcgctggagaaggaatgtttttcggctaaatcaagtatggcattaggcgcgctggtgcttttgtacggagtaaaccaaatgattctgttccactccgtcctgaccctggtcatcggcggcgtcttcattttaatcggagcaggcagcgcatgggccgggtataaagcctataagcattatgagcccatccatgcaaaggaagcggagagggaccacgcataatgaatgccaagggacccgggtgtgtcccttaacttctctccatcagctgcaccatgagcatcgcttttgaaacgatgccgctttggcttgacacttccacttccattttcccgaatttccggcccgcctctaaaatgcgcggtttcacttctatgaccgactccatctgtacgggcttcaggaagaaaatcgtaatgctttcaatgaccagctcgccgcgtttgcgggagcgtaaaaatcggctggcggcctgggttaaaatcgttgtaaacaccccgtaagaaatcgtgccgagctgattggtcatttgcggcgtgacttcatattgataaacggccggcgttttgttatcttcctcttctttaaatccccttgaaacaatatcatccagcttttccccgacctgaggctgcttttgaaccatttgaagcgcttttaagacatcctggcggctgatcattccgatcagtttgtgatgcccgtctgtcaccggaagcacttcaattccttcccaaaccatcatttgagccgctgaggcgacagatgtttttccgatcaccgtgacagggtttttggtcattactttttcaatgggaactgaccggtcatgccccgcgatatctttcggcgtgaggattccgtggattttcatctgctgatcgataaccggaaagcggccgtgtccggtttcatagttcttttcgtaccatttctccagtttatccttagggaacagcgtcactgtccgatctgcgggcgtcaaaatatcttccacgagcacaatctctttttttatgagctgatcatagatcgcccggttgatcatcgcggctaccgtaaaggtatcgtagctcgtggagagaatcggaagctcaagcatatcggccagctcgataatgctgtcgtcggtattaaaccctcctgttaccaaaacggccgcgcccgcttcaagcgcctggcggtgggcgttgattcggttcccgacgattaacaggttccccgccgccgtataacgcatcatcgcgtcaagctccatcgccccgatcacaaacttattcaacgttttatgcagacctgcttttccgccgagcacctggccgtcgatcacattgacgacctcagcgtatgtcagcttttcaatattttcttttttcttctgttcaatccggatggtccccacacgttcaatagtggaaacgaatcctttgttttcggcttccttaatggctctgtaagccgttccttcactgactttcatttctttcgcaattcttctgaccgaaattttttcaccgacaggaagcgaatctatgtatgataggatttgttcatgctttgttgccaagcgtttcacctctaaggacagtcttctgcttttattataagggtacgggggattcattcgcaatgagacgcccgaaaaaaggcggcaccacaaaaaagaccttctgaatgcttgattcagaaggtctttgacacatatgtcaggcaagctcaatggtctcgccgaccgccatgactttgccgacgcctccgggcagactttcagcgaaagcgtcagggtcctgttcaatgacggggaatgtattgtaatgaacgggaacgacctgtttcgctctcagccattcagccgcgagtttcgcatcttcaggccccatggtgaagttatcaccgatcggcagaaacgccaggtcaatgtgattcagttccccgatcagtttcatatctgagaacagcgccgtatcgccggcgtggaaaatcgttttgccgtcaatcgttaataaaatcccggccggcatcccggtgtatgtgatggttttgttttcttcatcagtgaccgccgatccgtggaacgcctgtgtcagttttactttgccgaaatcaaattggtgcgccccgccgatatgcatcgggtggacctttaaacctttaaagccgagataaacggccagctcgttcggcgcaatgacgagcgcatcgttttgtttggcgatctgctctgtatctccgacatggtcattgtgtccgtgagtaagcaggatgacatccgctttcacttcttccggtttcaaatttgtcagactgtttccggtcagaaacggatcaaaaataatgttatgggttttcgtttccacttgaatgacagaatgtccgtgataagtcactttcatcgttttcacctcataaaaaattaatatttatcaagttccctttttgacaaacgaaaaaacttacagggattgatgcctgttaatcacattcagcccgcctgttgcttcaatgaccgttccggttacaagatcggaatcttcttcacataaaaacgcgatgattctcgcaatatcctctccggttccggacctgccgatcggcgtcttttctttgccgattttccgtcttgcttcctctatagacgcttctttcatatctcctacaatatcacccgggcagaccatattggctgtaatgcctgattcggcttcttcaatcgcaatggttttcgttaacgaagccaatccgactttagccgctccgaaagcggaacggtgaagccagccgggggcatggtccgctccttgaaaaccgtatgtaataatccggccgaagcgctgctgtctcatgaccgggataaccgctttaaacagatggaaaacggcgcttaaattcccttcaagcatgccataccattcgtcatcggagtaatcggcaagctttttgcgctcaaatatgtacggcccggcattgttaatcagtatgtcaatccttccaaaccgctgaagggctgcatcggcgatccgcatgagatcttctttccgggttacatcgcccttaacgaattgcaatctgtcatggcacccgggataatccgccttcagacaagcgaccgcttcttcgtcctgtctgtaattcactgtgacagaaaagcctttttccagaagcatttcagtcacttttcggcccaatccctttgtaccggcagtgattagagcatgtcgcacattgaataccctccccaggcaacgtagccgcttcaataaaatcaagacgtttctccctctactttactataaacaaacggcaatatcacttttttgcacttcgtccgcacgaaaaaaaagccgtctttacagacagcttaattttctgaaggagcagaggcttcctccatgccgacataaccgctttggtatgcctctgagataagcctggccgtttcttcactttctttttcatcatagatgtaacggtcttgttctttgcgcattccttttacctcccatcttttatagatgtagggtgtctgatatgacgggaaaatatgaaggaaatttcagcaaattaaatgccggcgcaggcttttgcttttacgagcgcctgttctacctgctgaaaacccgttccgccggcgctcattcttttttcaaccgcatgatgcggatcgagcacggtatagatatcttcttcaaagagactgctggcttgaaggaattcttcaaatgccatgtcacttaaatagattcctttttcaatacagctgtacacaagcttgccgaccacttcatgcgcttctctgaacggcatgccttttttagctaaataatcggcaagttccgtcgcgtttgaaaaatcttgttttgtcgcttgtttcatgatgtctttgtttactttcatcgtttcaatcatgcccgtgaaaatctgaaggcttccttcaacggtttttactgtgtcaaacatgccttctttatcctcctgcaggtctttgttgtaagcgagcgggagtcctttcataattgtgaaaagacccatcatatcaccgtatacgcgtccggttttaccgcggatcagctccgccatgtcggggtttttcttctgcggcatcatgctgcttcccgtcgcgtacgtatcatccagttcaatgaatctgaattcctgcgagcaccatagaatgatttcttctgacaaacgtgaaaggtgcatcatcagcatgctgctgccgcttaaaaactcgagaataaaatctctgtcactgactccgtcaagactgttctcgtaaatggagtcaaaaccgagcagctccgccgaatagttacggtctatcggaaacgtagttccggcaagcgccccgcatccgagcggcgatatgttaatccgcttcatagcatcccgaaaacgctctttatcccgttcaagcatccaaaaataagcaagcagatggtgggcgaaagaaatcggctgggcccgctgcaaatgagtgtaccccggcagaatggtctcgacattggcctccgctttttcgatcagcgctttttggaactgttcaatcagcacgatgatatgcgagacatgatctttcaaatatagatgcatgtcagtcgccacctggtcgttccggcttcttccggtatggagtttgccgcctagcggtccgatttcttcaatcagcattttttcaatgttcaaatgaatatcttcataatcaacagagaattcaagcgctccttcctctgctttttgcaggagagtctgcagcccttgacggatggcaccttcttcttcttccgtcagaatgccgcattttttcagcattgccgcatgagcgagagaccctgtaatatcctctttgactaagttttggtcgaatgtgatggatgcgccgaactcatcgacccacttttccggtgttttttgaaaacggcctccccaaagcttcttcatgcttcaatctgctccttctttttcacaatgctgtttacttttgtcggcagcccccaaagctcaatgaaaccgattgccgcgtgatggtcaaacgcatcgtcttttgtatatgtcgcaagtttttcgtcgtagagagaatattccgacttacgtccttctacaatggcatggcctttaaacagcttgacgcgcacaacgccggtgacatgcttttgggtttctttcaggaatgcaagcagcgcgtcttttaacggcgagaaccataaaccgttatagatgatttcagacagtttttgttcaattgccggtttgaaatgggccacttctttcactaaagtcagatcctcaagctctttgtgagccgtaatcaaagtcatggcgcccgggcactcataaacttcacgggacttaatgccgaccaggcggttttccacatggtcaatccggccgatgccgtgttttccggcagtctcgttcagcttgagaattaaatcagcgagcgggtaggttacgccgtcgattgaaaccggaacaccggcttcaaatgcgatttcgatgatttccggaacgtccggcgtgttttcaagagatgctgtcaggtcatatgccccttcaggcggcgccgcccacggatcttctaatataccgcattcattggcgcgtccccataggttctggtcgatggaatacgggctgtcaagattgatcggaatcggtatgccgcggcttgcggcgtattcaatttcttcttcacgcgaccattgccactcacggaccggagcaatgacctccagatcaggatttaatgatttaatggatacttcgaaacgaacctgatcgtttccttttcccgtgcagccgtgcgctacggccaccgcgttttccttttccgccacttccacgagttttttcgcgattaacggacgggatagtgcagatacgagtggatacttgccttcatacattgtatgggcctgcatagaaatgagcgcgtactcccgggcgaattcttctttcgcatcaatcacataggaatttacggcgccaacttccagcgctttttgctgaacgaatgccaaatcctttccttccccaacatctaagcagcaggcaacaacatcgtatccctgttcttgcagccattttatcgctacagaagtatcaagacctcctgagtatgccaatacaacctttttttgttctgccatgttaaaagctccctttgtataaaaattagttttaattaataaaaatgcattttgtatgtatacactgtaacaagtaaattctgttttttcaagccttttataaaaaaaaccccacccaattttttgagcggagcagagcctttttatacatttataaatcttttcggatttcccggagcacatgaggcagttcaggaataatcagtttactcattgcaagctttacggcgcctgaggagccgggcgtgcagaagactgcggtatttcggatcacacccgctgccgctctggacaaaatggcggcggagccgatgtcctccgtatagctcagcatgcggaacagctcgccgaaccccgggagttcttttgaaaacagcggcgtgaccgcttcaattgtgacatccctttcggcaatgcccgtccctccgtttaacagcaccgcatctgtatattcatccatacagccggataaaacggctttctgcaattcatctttttcatcttttacaatgtcataagcgaccgtttcaaatcccgcttctctgatgaaatccatcatgacgcgcccgcttttgtcggtttctttcgttctcgtgtcgctgactgttatcaccttgcagcgcacggctgacggggcttcttgtttatgttcatgcacactcattgcttcacctcatcgtttatgtattaaacatatcgtaacgtttgattctggggcattcaataaaaaagcacaccctaaaggatgtgcttttttcgatcattactgtgcaagacggacaacgtcacgtgcgatcatgacctcttcgtcagtcggaatgatgatgactttgacaggagagtgagggtagctgataaacgcttcctcgccgcgcacgttgttcagcgcaggatcccaatatacacccatgaattctaagccgcgaagcacgcgttctctgacttcaacgctgttttcaccgatacccgcagtgaaaataatcgcgtcaacgccgctcattctcgcagcgtaagaaccgatgtatttatggattctgctcgcaaacacttcaagagccgtttccgctctttcgtttccttcttttgaagcttctacgatatcgcggaggtcgcttgagaaaccggatatgccaagcagtccgctctttttatttaatgtatttaatacttcatctgccgtctgatccgttttttccataatgtacgggatcaatgcagggtcgatgtttcctgaacgtgttcccatcgcaacacccgcaagcggtgtgaagcccattgacgtatcaatggattttccgccttctacggccgcgatacttgcgccgttaccgaggtggcaggaaatcagacgcaaatcttcaagcgggcggccgagaagctcagctgcgcgctgtgtcacgtatttatgagaagtgccgtggaaaccgtatttgcggatgccgtatttctcgtagtattcgtacggaaggctgtacaggtaagattgctcaggcatcgtttggtggaacgccgtatcaaacactgcaaccgcaggcacatccggaagcacttctttaaaggctttaatgccgacgatgttagccgggttatgaagcggcgcaagttctgaaatctcttcaatctcacggattgtttcatccgtaagcaaaacagaatcgctgaatttttctccgccgtgaaccacacggtggccgattccgtcaatttcgtttaaatcctttataataccgaattcagtcagcttgtgaagcagcatcttcaccgcaaccgcatgatccggaatatctgtcacttctgtatttttttcgccgttaacagagatagtgaaaacgctgtcggcgataccgatccgttctactaaaccttttgttagcaccttttctgaaggcatttcgaataactgaaattttaaagatgagcttcctgcgttaattgcaataattttagacataaatgacgctcctatcaaaattcttcttcgtttgttcgttcttttttcccagaccataactgcggtccaaaaaatatctgacttttccatttaaacattgtcaactcagcatttcaagtcaacatccacattggtaccgcttacaatacgaagtcgatattttctgataaatctcatttgtgccaaatggacggcacggccttacggaatgttattttctttccttaatttgtgttttcgccctgatttccattcattttaaaaagcgaaaagcagcgcggaattttgcgtctcacactgctttttcgccattatttttctttttgaatccactgatccaattttgccatcatctcccgcatcgcctgctggttcgcaaaagaaggaagattcgccaaaagcgcttgtttcggcggctttgcgtcttcgccttttttctgcaggattaaaatgctctttgcctgcgcttcatctttaaacatagtagccggcagctgaagcagggcgttgatatatactttttccgcaaaaaaccgcttcagtttatcgctttgcgcgctgtcaaacagatggttcggaatcataaaaaataagtatccgcccggttttgtatgtttgacgctctgctcaataaataagtggtgggcaaatgagtggccttcatccgctttcagctcaaacgcttcagcgccttcgtcattgggatagtagccgaccggcaaatcgcagataaccgcatcggccggttcgataaataacggctgaagactgtcctggcagaacagctccatttctttttcctgcagattcgcctgcgcatatgcgatcttcagaaggacatcgtcgatttcaatgccgaagctttttcccgctttgtcagaaagctggtttgccgcggtcagcagaagatttccggtgccgcaggcggggtccagcaacgtcaggccttttcggccgcccgtaaatttattcacgaggtaactgatgaaaaggccgatcgtatcaggcgtcatctgtctgttcggatgggacttatctttcagtccttttaaaatggcgagctggaacgccttgcggatccattcatgctcccattttctgaagtctgctttcgcaagcaggcttttaagctcgccggtttgtttttcctgaagcggaagctggtccgttgtttcaagaaaatacatctctcccgcctccgcaagcccctcaatataagaaatctcaaggccttctgctatcacttgggcggcttcatctaaaagttcataaatctgaccgacatgatcgtgttgcatgctgtttcctccttgccatgaaaagagctccgcggcagcacccggagctctttttctctctttacttgattaacgcttttgcagcttcgataggcttttcataattcgggtggtttgtcgcttcgcttacgtattccgcgtaaacgacttttccgtcctgatcaaggacgaatacggaacgcgccaaaagacgaagttctttgatgtaaacaccgaatgcttcaccaaatgacatctctttatgatccgataatgtttccactttatcaattccgttcgctccgcaccagcgcgcttgtgcaaacggaaggtcggcgctgattgtataaacgttcacatcaccgagttttgcggcttcttcgttgaagcggcgtgtctgcgcgtcacatacgcctgtgtcaatggaaggaataacggatatgatcgttactttccctttcatatctgctaatgtcttctcttctaatccgtttgtcaaaaccgtgaagtcaggagcttggtcacccggtttcacttcttgtccgatcagcgtcacggctccgcctttaaatgtaatttcagccattctgattcctccctttatctatgtatagctctatcatagtcgagttttatgcaaactgcaaaggttatgccgcatcgtaaaaaaagctaactgcgggcggcagttaacttttctgttataaatcgatatccgttcttttttggttccggcctttttcattctttttaaacatatgctggatgcgttcaatcgtttgaggcgcggagtctaacagtttatcaatcagatgggtgttttcgtctaaatgaagcatacgcacgccgtttgttccgacaatcagaaacgcaatcggcgtaatggatactccgccgccgcttccgccgccgaacgggagtttctgctcttttctttcatcatcatcggttcttttttcagccggctttcctccaaactcgcttccgcccgccgcaaatccgaatccgacctttgaaaccgttaagattacgctgccgtcaggcgtttcaacaggatcgccgatgattgtattcacgtcaatcatttcttttaaattttccatagcggttttcattaaaccttgaatggggtggtctgccatatgcgctcctccttaaactgatgaatcattctttgaagcaaccggaaccggctgtttctttcgtatgatagaaagtccgttccgcccgtatttgagcaatttgaaagctgcacctataagatgtccaaaacgaaaaaagaatatacactgcaaatgcgtcttggatgcaggcacttgaaaagacggaatgacttcgcacaccggtttatgtatgaaacgcagatgatcatacagcatcgccgtaaggcctccctttacggcccacaatccgccggcggcgattcccgtaacggcggcgtcctttattccgataaccgtcacccattcaaacttcgtaacacggactcccgcaagaaatgaggcggcgatttggcgcatctgcaagacttggtgcagaatcatttctattctgtgaatgctctgtttgacatcttcatatgtgatttttttcttctcttttttctgacctttcatttctgatttcgtgtcctgtttgacatcaatagacgcgtcttcgctgtttactttaatgacgggcagcgtttttttaaaacggaccagcccgtataaggccgagagtttaaacgtcagtttgtcgttatctttatcgtgaagatattcgaaagtcagatggattttcatcctcatgagcagccagaccaaaatgagaatgagaataacagctgctgcggcatatcccataggcttcacttccttagcagcattatcgccaaaaccaaaaaaaataaacccggacgtttattccgggtttactgcttttatttgcggtacagcgcttcgtgaatcaccgttgtgtcggcgatcagatcgtgaatgccctgctttttgggcgtaaacgcaatgacgatatagagaatccagattttatcgatataacgccccaccgcttctctgaaaatgacggtgctccaagtcagcggctttccgggcgtcaaagaagtgacctttaacccgaagaccatcttgccgagtgtctgatgaaaccatttcgtcatgaacacaaaataggcgaggtagacgatcagggttgtgacggaataagctgagattgtaaacattccgcttgttgccgggagcttcatcagcgtgaaaatcggtgaaacgatgagatggttaagtccccagaccaccagccaatcaagaagaaacgcccaaaacctgatccaaaagcccgcatatgcctgctcgggcgccctctgttgttcggcttcctcttctttgccgtgaaagccttcgtaagtcgcgtccattctttcttcccccctactttgcatagagatacatcatccgcggcgaaccggattgcgaaatgagttctttcatattcagaaaatcaatttcgcttttaaacattttcgctgcgctcatggaaaagagcgagcctaatccgaatccttcctcgtatgtgatgactgaagcgtttttcatatttttatggtcctttttcatcgcgctgatcgtatcatcgtaaaaaccgagctcatcaacgaggccgatttttttcgcttgtctgccgtcgtaaacacggccgtcggcaatttttttcacatccgcttttgacatgtgccggccttttgaaatgacattgacaaatccttcataagaatcgttgaccattgtctgcatgatctttctttcttccttcgtcatgtcgcgggtcggggacatgatgtctttatgcgcgccgcttttaatggtttcaaacttgatgccgagttcatcggcgagcttggaataattgacgctttccatgatgacgcccagtgaacccgtgagcgtttccggtgaagcatagattttatcggcggccgttgaaatatagtagcctcccgatgccgccatggagcccatggacacataaatcggtttcttcgtttctttctttagttcttccagttttttatgtatttccgcgctttcgtacacgcctccgcccggggaattgattttcagtacaattcctttgacgcttttatcttctttcgcacgctcaacctgttttaaaaatgatctgtgatcatacccgcctgagctgagcaggccagcggacccgccgttatcctcaatcgtgccgtccacttcaagcacggcgattttactgccggggctgcccttatccagcgtcacttcctctgtgtcatctgtcagtgatgcaaagtcagaccctgtatctccgatattcttcagcaccccgacggtcacacttgcaatgaccgatacgccgaaaatgccgagcgcgatgacgagcgcaatccatctttttgcattcatttgttctcctccttttctgtcaatattcgtacgttcccccgtaaaaaaagattcatttttttcatgaagcgctttctcttaacggataaacaggaaacatgttacactattgccacaggtattttaacacaatacctgctgggagaaaaacgtaaatatgacagcaaaggggaatggggatatgaccgatcttcgccgcaatgtttatttttttcacaaacaaaacaacgaaacaaaagaacaagtcagctctttgaagcagcttgctgaatcgcacggttttacagttgcggctcacccggaggatgccggaattatcgccagcatcggcagcgacggctcatttctgcaagccgtcagaaaaaccggattccgtgatgactgcctgtatgtcggcatcgctaaaaaagggaaagcccatttgtactgtgattttcacagcgatgagcctgaaaaaatggcggccagcatgaccgcggaacagcttgaggtcagaaaatacccgctcattcatgtaacggtggacggcagcaatcattttcactgtttaaacgaggtttccatccgttcaagcattattaaaacgtttgtgatggatgtgttaattgatgatcttcattttgagacgttcagaggagacgggatgatcatttccaccccgacgggcagcaccgcctacaataaatctgtttcaggcgccgttgttgatcctttgatttcctgcatgcaggtatccgaactggcgtcgttgaacaacaacacataccgtacactcggatctccgtttattttaagctcagaccggaagctgacactgcaggtggtccaggacggcaatgagcatccgattatcgggcttgataatgaagcgctcagcacgcggaatgtcaaaaaggttgagattacactatccgataaaaaaatcaaaacggtgaaactgaaagacaactctttctgggaaaaagtaaagcgatcatttttatcataaaaaaagaggacgggcatcactgcctgtcctctttttcatatacgatacggccgccgacgacggttttgacagcttccaattcatgaagctttttcggatccgtcccgaacggatcaccgctgagtacggtaaagtcggcatcatagccgggggcgatccgtccgcggctatgttctttatggatgatggccgcgcttccctccgtgtaaagctgaatggcttcgtacacggtcaggcactctttttcataataggccggaccttccggatgctgcttgcttgtacggagcacagccgattgaatgcccagaagcggatcggccggctcaatcggggcgtctgagcctccggcgcacagcagcccttttgacagcagtgttttccaggcgaaagccgttttcatccgctcttctccgagccggtcaatcacccacggaaaatcactggccacaaaatgcggctgaagatcaagtccgatcggcagccgggcggctctttcaatcaatccggcatctaatacttgcgcatgaatgagcctgtctagctgtccgggctttgccgggtatctttcgataacatcgagcaccttttcaaatgcaaggtcgccaatcgcgtgcacggcgatctccatccctttctctctcgctttataaacaagagcggcaagggtctcgtcatcgtgcacctgaacgccggaaactgacggatcatcatgataaggctttttcaacagagcggttctgcctccgagcgcgccgtcagcaaaaattttcatcgctccgtattccaggtaaggtccggtcgatttatccagagcgctccagctgtcgacggcttcgtgatgaacgagcagatgggcgcgaaaaggataaaggccgctgccggttaaagactcgtacgcggcaacgggaacggacgcgtctccgtagtatgccagatcttctgaatgcccgcctgtcaggccttttgaccagcagtccgtaatcgccgtttgaagcgcgcgtttgacatagtgaagtgagacgggcggcagggcctgtgtcacaagctcttgggctttatccagcagaaggcctgtcggaccggtgccgtcccggacgataatcccgccgtttggatcagatgtttcgtttgtaatccccgccgcgcgcaatgcggccgaattaaccgcaacggcgtgccggcatacccgcttcagcaggacggggcggtcgggaaagagcgggtcaaggtcatgcttcgtgacgtaatccggccgttcaaacaggttttcatcccagccttcgccgatcagccattcgccatcttccaattcacgctctgcttcttttgcggcccgcaggatcgcttcttttgacgtcagctgcgacaaatcgaggcgaagctgtttttccccgtgtccgattaaatgcatatgactgtccgtaaaccccgggaacatgacagctccatgtaaatcgatttcctccgtatcaggcgaaccgtatgttccttggagctcccgatagctgcccgtcttcctgacgacgccttcttcggtataaacggattcagtgacatgattcttgtcaagcattgtatagatggtgccgccgtgccaaatcgctttcatccccgctcaccctttatcctgtattatgcttttttatcagccttcagccgttcttcacgctgtctcagttccacacgtctgatttttgcggacgccgttttcggcaggctttcgacaaattcaatctctctcggatatttgtaaggcgccgtaatcgtttttacgtggttttgcagttctttgacaagttcgtcactccgcttttcatcgtcttgtaaaacgacataagcttttacgattgaacctctgatttcatccgggcttgccacgactgcacattctttcacttccggatgcttcacgagcgcgtcctctacttcaaaaggtccgattgtatatccggagctgacgataatgtcatcattgcggctctcaaaccaaaagtagccgtcctcgtcttttttcgcgcggtctcctgtaagaaaataatctccgcgaatctgctttttcgttctttcgggatctttataatattccttgaataaggccggtgtgctcaaatgcacggcgatatcgcccgtttcgcctgtttcgcatatttcgcccttatcgtttataatctctacttgatttccgggggtcggtttgcccatgcttcccggcttaatatccatatccttcaggacgccgactaacagggtgctctccgtttggccgtatccgtctctcactttaataccgaaatgcttccggaatacgtcaatgacttcccggtttaatggctcacccgcagaaactgcgctgtgaagggcagaaagatcatatttgtccaactcctccacttttgccatcaggcggtattccgtcggggtacagcagaagacatttacttgatggcgctccagcagctctaaatacgtcttggcgttgaatctgccgtgataaatgaatcctgtcgcgccgcttcccagaacggcgagcagcgggctccacacccatttctgccaaccgggcgccgcggtggcccacactgtatcgtcttcggaaatatccagccatgcaccggctgatgtttttaaatgggcaaaggcccagccgtgtgtatgtacaacgcctttaggctggccggtcgtgcctgaagtataggacaaaaacgccatgtcctctcttgttgtatcagctgtttgaaaactgtttccgtccgcttcaatcgttaagaggtttttccagccggcatcattttcaccgattgacaatgtcaccagctgctcggtattcacctcgtcaaatgcgtttataaatgaaggataaacgatagcgcctttcacttcggcgtgtttgatccggtattcaaggtctttggcgcgcagcatttccgagcaaggaatgacgaccatccccgcttttaagatcgctaaataaacggcatacgcttcaagcactctcggaaccatgacaatcagcttatcgcctttttcaaatccgagacctttcaggcgggctccgattttattcgtttcttccatcaatttttcatacgtccagactttcttgccgcctgtttgatcttcccaaataagcgcgttcttctctttggaacggctgaacttttcgatttcatttacaagattatagttctttggggcgattaaatcttctcgttttaacacgaacaactcctcactttctttccccattatacataaacataggccattacaataaaaatatgcataaattgcttccagccttctatctatactcatgaaaaaagagcggggaattccccgctctcttagccattatgtgaagttgtgattaaaactgctgctggctgcttccgcccatgctttgctgagcaaaagagacaagacgttttgtgatttctccaccgacagaaccgttggcgcgagaagttgtttccggtccaaggtttacaccgaattcagaagcgatttcatacttcatttggtcgatagcttgagcagcgcctggcactaaaagctggttgctgtttccgctgtttgattgttgtgacatgtgtatcacctccttgtgagtatagaatgtgataaaacacatgtcttcattcaaaaaaactttggtaattgtatacagttttaaaacaggccggcaaacttatcgtgagcttcctgctctgagtaaacagtgatggtttcgatgccggcagcggcctctgcaatcagcggttcaaaatcaacgaagctttcgaagtgctcgattttttcttttttcggacgcgttttcggacttggcggcgtaaagatggtgcagcaatcctcaaacggctgaatgcttgtttcataagtgccgatttcttttgatttctcgatgatttctgttttgtccattccgattaaagggcgcaaaaccggtgttgccgtcacggcattgatcgcatacatgctttcaagcgtctggctcgctacctgcccgaggctttcccccgtaatgatcgcgagcgcttttcgttcttctctgattctgtccgcgatttgcagcataagacgccgcgtcgccgtcatcgtatagttttccgggatttgtttttggatgagttcctgcgtctttgtaaacggcacgatatgaagcgtcatactgccgccgaacttcgcgaggcatcccgcgagatccatgactttctgctttgcccgttcgctcgtatacggcggactgaagaaatgtacggcttcaactgataatccccgtttcatcgcgtaaaaaccggcgaccggactgtcaaaaccgccggaaagcatcagcatcgctttacccgcggaaccgacaggaaggcctccggcgcctttttcgttacgaatggtcaggaatgtcgcttcctccctgatttcaatccgaagcggaatatcgggatttttcacatcgacggttaatccatccgtgtttttcaaaatatggccgccgatttcagcgttcatcgcattcgtatctaattcaaactgcttgtaagcccgtttggtctcgaccttaaacgtattccccggtttatattcgccttctatcgcggctaaagccgtttttttaatgtcttccagcttgctttcgcatttaattgcgagactgaaactttgaatgccgaatatattctttaataaggaacaaattccctccgggttttctccattaagtgtaattgacatccggtcccggtttgaaaagtattttacttttttataatcctttaataccaggcggatattttgttttaatctttcaataaaactgcgtctgttttttccttttgtggatatttcaccaaaacggattaaaatatgatcgtaattcatatgctacctcatcattttttttagtttttgaacagccggcaccagcgcggccataaacggctccgtgatgtcagccgtatgcatgaagttcaggctgactctgatgctgcttgatgcaacctgttcgcctttattcatttgcagaagaacacggctcggtttatgctctcttgccgaacatgccgcggttgtggagacatatattcctttttcctcaagcatgtgcagcagcacttcggccttcacgcccggaacggaaaaattaatgatatgcggagcgctgttttcggcgggagtgttgatgacgaccccgtccgccccgctcagcctttccatgagcgcattcttggcagcctccacggaagaaagccgctcattcatgtcacgcgcggaaagattgatcgctttcgcaagggaaacggcgcctgccgtatgttctgttccggcccggacgcctttttgctgcgagccgcccgttataagcggaatgagccgcgttccttttttgacgataagcgctccggtcccttttaagccgtgaaacttatgccctgaaacagtgcaaaggtcaatgcccgcttcttctatagacagaggaactttatgaatgccctgcacatgatcaacatgaaacagaatattccggtgctgcttcaaaaacccgccgatttcctttacgggctgaatggagccgacttcgttattgacatgcatgacgctgacgattatcgtatccggcctgatagccgatttgacgtctttcaaagaaacgaagccgttttgatcggccggaagatatgtgacttcaaagccgaacagctctgtcagctgatcaagcgtctccgtcacagaaggatgctcaatcgccgaagcaatgatatgtcttcctttactcatgtttgcccaggccgctccctttaacgcagcgttattcgcttcagtcgcgcctgatgtaaatacaatatcataattttttaaacgtaaggttctttttatttgctgagcggccgcttcaaggagctgctccgtctcagttcctaactggtgcagagacgaaggattgccgaaataacggctgctcgtctgtttatacacttccaaaacctcttcatacggctcggtcgttgagctgttgtctaaatatatcattttttttactccttttatgaaaacggtacatcgtatgatatttatgctaccataacaaaagtaaatagaaattcgcaataaatcgagtattgacttctctgtacattgccatataataagtaatgttcgttttgttatattatctgacaattaattgacagaatatttcaacatagtatttaggaggacttttatgaaacactcactacctgtcaaagataccgttattatcggtttcatgctcttcgcactttttttcggggcaggaaatatgatatatccgccggagcttgggcaagcggcggggcataatgtctggaaagcgatgggcggtttcttactgaccggcgtaggactgccgcttttaggtattatcgccatcgcattaacgggcaaagacgcgaaaggacttgccgataaggctcacccggtattcggcactattttcaccgttgtgctttatttatcaatcgggccgcttttcgcgattccgagaaccggaaccgtttcatatgaaatcggtgcagttccgtttttaagcggcattccggaaagattatctttatttgttttcacgttgatctttttttctattacgtattatttagctcttaacccgtccaaaatcgtggacagagtcggaaagattttgactcccattaaattcggtattattttaatcattgtcgtaaaagccatcgtcactccgatgggcgggctgggcgccgtacatcaggcatattccggaacgccggtgttcaaaggatttttggaaggctataaaacaatggatgcgctcgcctcaatcgtcttcggcgtcgttgtcgtcaacgctgttaaaagcaggggcgtcacccagcgtaaagcgctcgccgccgcttgtattaaagcgggtctgattgcagcggcgggtttgacattcatttatttatctttggcctatttgggagcgacaagcacggacgctgtcgggccgctcggcgaaggcgcaaagattttatcagcttcatctgattacctgttcggttcactgggaaacattgttctcggtgccgccatcaccgttgcgtgtttaacgacaagcatcgggcttgtcacatcttgcggcgaatatttttcaaaattgattcccgctttatcatacaaaatggtggttacgattgtcacgctgttcagtctggcgatttcaaatttcggacttgctgagattattgcattttcagttcctattttatcagccatttacccgctggcgattgtcattatcgtactttcctttattgataaaatctttaaggaaagacgcgaagtctatatcgcctgcctgatcggaacggggctgttcagtatcctggacggtttgaaggcagccggcattccgctcggatcattagattcattcttaaacgcaaatcttccgctttacagcatgggaatcggctgggtgcttccgggcattgccggagcgatcatcggctgcatcatcacgttttttatcagcccgcccatcgaattaaataaagcaaaatcgtaacattcagcgcctgcggtttgatgtatatcagccataggcgctttttatattccgtgagaaacaaaaaaactgcacctctgatttccatcagggtgcagtttttgcttgtgcgtctatgaagcagattgatcagctttaatttttttcacggcgccgggagctgctttttcaacagcatctgccgccatctcataagcttcattatagctgtaagcgtaaaacagccgttccgcttctttcagctgttcggataaaatatgattctggcttcggaaacggttgccgtactgaatgatccgctcaatcagcttcacctgaatcacaagttcttccgcctcttcgctgacttccgcaaccaccttttcagcttcggtcagatgtttggcggcttcctccatgtttaacggcagctcttccaattggctgacggtctcttctatatgatgatttgccgtctcgagcttgtccttgacttgttcaggaattcccggcacgttgcttttttgcagcattcgggccgtgtcagaaatggttttccgaagattcatcagcgtttcccgcgcctgcagttcttcttttctgagcgcctgcagattttcacggtattcggcatgttctttctgagcttcttccatctgcttttcgatggcctcgacttcttcaatcagcagcgagtaagcgacatgctcaccgtcaagcttttctctcgcctgctcaaggagccggccgatcgtttccagctgtttttcgaaagcatgctgtctgccgatttctcccgccgtcagctgatagctttccttgacgagctccgtttcggtttttgtgcggtctttttcttcctcaagcttctcatacgcgatgatcagctcaggcattttgcttaatacggactgtccggcttccacttcgccttccagctgttcatacatcgattgaatggtttcatcaatcagctgaagaatggcggacgcttcgtcgacatctaattcttccaaaagcgcgctttcggcccgtttcaattgattggtgagtgtctccagctctttttcgatttgaatatgctccaatttgtagcctttttccgtcatttcccggtagccgtctttcagcttggcaatttggttaggcacggtctgtttacagtcagcgagcagtttcggaacgtcatctatgtatgtttgaagctgatccagtctgcggtcctgttcaagcagcacttttctcgctttgatgtaattgccgctttccgtctcttcttcgaacttttttatgccgctccagatttcgtcgagatccgtctccaggctgttatatagctctccgtagagatggctatacgccagaaggttttttcgcgcttttgaataccgctcacgcacctgttcaatctctccgcggcttttttcctcgctcgtcacaagatcgctgatctcacgcagtatgccttctatatttgattcggctgcagtgaggaggtcgtcgatgtggacaagcacctgattcgcttttttaaaccggtatttgtcggcgttctcttcggcatcataaaggagctcttctactttcggcagatgggctgtgacaatttcatcccactcttcgcgccatctttcaaagaactcttccgtctctccggtcattttcagatgtttgatcttggacatttcttccactatcgaacggtttaaaatttcaatcttccatgactccagccggtcaatttccgtataaatttttttcctgaaaaagtagcccgccgcaaagagcgcgagcagtataaccaataatccgatgactaactccataatgagcccccttgttgttctcttaatctgtcagggtgttttatgtattcagaaagatttcaatatatgtattgagaaaatctgtcgttttcattgttattatgataccatgtaaccaacattttttgaccagaaatcaaaaactttttgcataatttcggcaggattctgcaattttttaatggagtgacacaaatggaaaaacgagacgctcatatccacacgcctttttgccctcacggctcgaaggatgcgctgaaagaatatgtcgaaaaggccctggaaagaggctttgactcgatcacatttacagagcacgccccccttcctccgtcatttcaagatcccgtaccgcttcaggacagcgcgatggatctcagacagatggaggtttatttggagcggctgtcacagctgaaaaaggaatacgatggacaaatcagcattctgaccgggctcgaaactgattttatcacagggtatgaagaggaaaccgcggcgtttctgaacacgtacggcccctcactggatgacggcattttatccgttcattttttgaagaccggtccgtcttatatctgcctcgattttgacgagcacgcctttcagcagctcgccgcgcacttcggaagcgttgaagccgtatatgaacaatactatgaaactgtgtattcttccattgtaacaccgctcggcccctttaagccaaaacgggtcggccatatcacgctcgtcaaaaaattcgcacgccttttcccttacagcatgtcacctcaaataagagagcttgcggcccgctgtcttgacgccgtgaaagaacacggaatggagctggatgtgaatacatccgggctcagaaagaagtttgccggggaagtatacatggaggattggatggctgagaccgcgaagcaaaaaaaaatcccgctcatattcgggtcggacgcccatcaagcggaagatgtcggcagttcctatgaaacgtacaaaagcatcattacttcataagcgccgcatcaggccgtcggaacacgctttcgatccagatcttcacctcttcaaaataccttttataaaagtacggttcatgaggctgcatatagagcacctctgtaatgtattgaggctgaagatacggcatcatcaagagggatttcaattgcagaataaaatgcggcacgggcagcgtcagccgtctgtggcgtgactgcccttcttcaatcaccagctggaaaatatatttttctttcattaagtaagtagacataatttccctgataagcacggaatcaatcgtcacttcccggtacacaaaccgcgttagttgacggttatcgtgctgataggataaaatatcgaaaatcacccgcaggatgcgttcctgcgcgtcttcaccgttcaaactgacggcggctttttccagcgcttcagtatagccttcgtaaaactcggaaactaaatgttccattaatccgcctttccctttaaaatagtaggagatgtgcgcaacattaacatcagctgactttgcgatttcacggacggacgtgccggaataacctttttggttaaacagctggacagcggcgttaataattttgtctttggtgcttactttcatacggctcacccctttatgtgtaacaattcaagcagaaaggcgccgttcctgtaagaacttctcgacaaatgccggcagaacggccggaactttgtttgatattatagaaaaagtgagggttttccatgtttcatgtcgaaaaacaatccggagataaagaaaaaagttatcagcttctgcttaaacagctcgaagccatgacagaagatgaaacggatgcgatcgcaaattacgcgaatgcatcagcgcttttataccattcattacatgaagtcaactgggcggggttttacttcgctaaagagggcgagctcgtgctcggaccgtttcaaggacttcctgcctgtgtgcgcatcccgttcggcagaggcgtatgcggcactgcctactctaacggcgccgtgcagcggattgccgatgtgaatgcgttcccgggacatatcgcctgtgacgcggcttcccagtcagaaatcgtcctcccgatccgcgtaaacggtgaagtgatcggtgtgctggacattgacagccctgtgaaaaaccgttttgatgaaacggacgaagcctatttagcaaagtttgttgaaacgcttgaaaaacgattaggataaaaaaaggagcccggccggcaggccggctccttttttatgtcgtcgtgctgttttggtggatgatcagccggtttttgccgttccgtttggcgatataaagcgcctcgtccgcttgctgaacgagcattttcaacggcatcgggcctgtctttgaccagcaggaaacgccgcaggaaatcgtcacgcgcggctcggtgttttcccggatggcgcgaaccagccttttagcgatgcgttctccggatgacacgttgatattcggcagatagacagccagctcctcgcccccccaccttgcagcgacatcatgctcacgaatatggtttttcataacggaggccacctgaatcaggatcgaatctcccgtttgatgaccgtatgtatcattaatggttttgaaattatcgatatcaacgaggatgaatacaccccgtttatgaattttcatgctgtattgaattttctcatccaaataggttcttgaatacagctccgtcagctggtctgtctgaacaagatgctcaagcctgtcgcgcagcatggagttcgtgaccgccaatgtcgcatggtgaatgagcgcttgaaaaagcttatacatttcaaacgtaaaagcatacaaatcctttttcaataaaatcgcgaacccgaagacggtgtcattttcgatcatcggcaccgccatcagcgagccgaagccgttttcgccgaatacagtctttccgctgccgataaacacgcccttttctccctcgaacagcttttctttcacaatgctgatataggggttcgcacgttctgtcttaaaaaaagcggtatgtcccggaagcagattttgcgtctcaaaatgatcaatatgaaaaaaagccacttcttccgcatgaaatgattgggtcataatggcggcgagttcccgcatcgtgtcagtgagtctgaggcgctgattcagctggcgcgatgtttcattaatgagctccagattcgcaatgctttttttcgattgctcatagagctgcgcattttcaaatgcttttcccgccgcgcccgcaagcagcagcatttcactgagagtactgcacgaaagaacggcatcctgcagcccctccgtcttcagaaccccgtaagtcccctgctggcctttgatcggcaggtaagcagatgacctgccttttctgagcagtctccccgataaataaaccttcagggcagacggatcggcatcttttccatccatatgtaattcttttgcgggaagctgtctgtccgtatcctgatcctgcgtgataaacagtgaaaagcggaaagaccggaaagccgtactcaaacttgcctgcagtttttccaaaacctcattttgatccaaaagcgaatggaacatttctgtcattctgtgaattttccgctgatgcttcgttttgtcaaacagcccgctttgtctcacagattgattgataaactgagtaacgatctcaggcaatgattccgggatcggcagcccgccttccgagcgcagataaaaggatctgccggacgtctgattcctgatcataaaacggccgtcactctctttcagcggagcataatgcggttcatcttctgtttttatggtgaaacgtgttgattctgccggtgaaagggtcaatgaaagagatgtaaagcaggattctagagctgaggccagccataacagcgagtcggataatgagacggattcagatttcgttaagaaaaaagaaagcattttctgatgaaaggccgtcacttcatcaattgtttgttttttcatttttatcacctaaacatgtactactcatttttgtacattatatcataaaccggcactcttcatggagaaatggttgacggcggcggggaaaaatcatataatgttctttgtgtgaaatattgcagcctttttgttcagcttctgtgtttgcattttgttccttagctgtaaggtgtatcgtgtaactctctgctgctggagcgaggatacatgaaaacaaaatgtgcacggtcggatcgaacagacggtttttattttccacaaaataaaaccaaaggaggagtcacattatggctcgctatacaggtccatcttggaaactgtcccgccgtttaggaatctctcttagcggtacaggtaaagaattagaaaaacgcccttacgcaccaggtccccacggtccgggacagcgtaaaaaactatcagaatacggtttgcaattgcaagaaaagcaaaaacttcgtcacatgtacggtgtaaacgaacgtcaattccgcacattgtttgacaaagcggcaaaaatgactggtaaacacggcgaaaacttcatgattcttttagatgcacgtcttgataacgttgtgtacaagctcggtcttgcacgcactcgccgtcaagctcgccaattagttaaccacggtcacatccttgttgacggaagccgcgttgacattccgtcttaccaagtaaaacctggtcaaacaatcggtgttcgcgaaaaatcaagaaacctttctatcatcaaagaatctgtagaagtaaacaacttcgttcctgagtaccttactttcgacgctgaaaagcttgaaggtacattcactcgtcttccagagcgctctgagcttgctccggaaattaacgaagcgcttatcgttgagttctactcccgttaagtaaaacgctctttaaagagcattggattaaaccccggacatgttgtgatgacaatgtttccggggtttttcttttgggctgttccctctctttattaaaaaagcccctgtccggggcttttttttatgtgccaaccggcttttcaactacatgtacattagaaaaccccataatgcctgcaacagataatgccgcaaaaagaattctctttttcatcaaattcctgccgaaacgcagaaatgagtttgttattttttctgactcaccttaatcatttgacaggcagaagcgattttttacataatgaatcatcatacttacaaaaaggagagacggaatgaacagcatcccctctatcgtcagcaagcacaaagcctattttgcggcggggcatacgagaccgctagaatcaaggctgaacatattgcaaaagctgaaacaagccatcaaaacacaagaagccgatatagcagccgctctctatcaggatctccacaaatccgaacaggaggcgtacacgacagaaatcggaattgttctggaagaaatcagttttgtgatgaagcggctgagaaaatgggtcaaaccgaagcgagtcaaaacgcctctgactcacctgggctcgaaaagcatgattatccctgagccatatggaatcgttttggtgattgcgccttggaattatcccttgcagctggcgctttcacccttgattggagccattgcggccggaaacacagtcgttctcaaaccgtcagaatatacgcctgcggtttccgctgttctttctaaacttatcagcagcgtttttccgagtgattatgtcgctatggcggagggcgggcccgacgtcagcactgttttattacagcagccctttgactatattttcttcacaggaagcgttgccgtgggaaaaatcgttatggaggccgcctccaaacaattaattcccgttaccttggagctcggcggcaaaagtccctgcattgtccataaggatgctgatatacagcttgccgccaaacgcatcgtcttcgggaaatttacaaatgcagggcaaacctgcatcgcaccggattatttagttgtccaccaagatatcaaaacgaagctcatagaagaaatgaagcatgcgatcagtgaattttacggccctcagcctgaacaaaatccgcagtacggcaaaatcgtcagtgaacgccactatcagcggctgctcagctttctgaatgatggcgtcccgcttacaggcggacaatttaatcctgaacaccacaaaatagcgccgacgattctagatcaagtgaaggatgactctccagtaatgcaggaggagattttcgggccgattcttccgctgtttacatacggcgatatcgatgaagtcatcgagaaagtccaatcacgcccaaagccgctcgctctttatgtcttcacaacaaacaaaggaatcgagcgaactgttttagagaatctgtcatttggcggcggctgtgtcaatgatacgttaatgcacgtcgcgacaccgtatttgccattcggcggcgtcggagaaagcggcatcggcagctatcacggatttaacagctttaacgcatttacgcacaaaaaaagcgtcgtcaaacaaacgaaccgcttcgacctcgctttccgttatccttcttccaaaaacgggctgcgaatgatccggaaaatacttaaataaaaaagcgcagagtatctgcgctttttataaatcatctatacaccaattaatcggttcgtctcccaaattaaacctatttttaaaagttcaaatcgaagtctaaccgcaaaaatgaaccaacccaactgtaggaaaggttaatccttatcaccctggtgagtcctataataattttcagcggtatagatattccactcccaaaaatttgctccttgacacaaaatataccgatctaaaaatatctcaaaattaagtttcattggttcatactcaataaatccgcggaaccataaatagtttggatctgtagaaattttggttttgtcaattaacaaataacatccgtctaacagatgtgcgacaggaataaactgaggctctaaaaaaccattttgcatatacttttcaatctcttctaaatcaagaatatgcaaaccccacctacattctcaccgtaaatcaacaaatcaaatattctggctccgttatgcaattttaaaaaggttttataatcttcaggaagtgagacttttattttcttctcaaaactctcaatctccagatctgttgcacctttaaagaaagtacattctgtttctaaaagcgttccttcattccctaaaatgttcaagcggcctttttcatcaattaattcttttagaccttggagcgttttttcaacaaaaactgccattgagccacctcttattattagagcattgctattttattcacaagagcaggagccaatgttccagttgaagtatcaggaagagaacctttccatccggctactgaagtatgttgggacataaaaaactttgtctttttaggataatacgactttgaatatgatttacctgcttgaaaattctatgttatggggaaaacctttcgtattaaacatataaagacagtctgttaaacagactgtctaagatgttgttacatcacaccatactcagctgcggtttaaataattcatagtgaatggattccggcgttatattgaattcagaaatcagctttttcatttctttaatgaacgacggggatccgcacaggtaaaaatcagcatctttatctgtcatcacttcttctaacagctgtttgtcaatccggccttcccgaaaacgaatgttttctgaacggtcttgttcggacggttcgctgtaaataaagacggtgtcagcggatgagtgttccgcggcttcttcagcttcatgccgcagcgcatgatactctccgctccttgccgcatggataaagagaacgtttcgctgcggctgggttttggcaaccgtctttaacatgctgatcatcggggtaattccgacaccggcactgatgagaaccagattctttttggaatcagggtctaatacgaaatccccggccggagcgctgatctcaattgaatccttttcgtgtaattggtcatgcagatatgaagaaacaattccgtcttttttcacggaaatccggtaataatccttaccggatacatccgacaaactgtactggcggatatgcgtataacccgtgtccggaatgtatacttttacactgatatactgtcccgctttgaattcggggagaacttgtccgtcttccggttttaaataaaacgacgttatctctttgctttcttttacctttttatcaattttaaacgccttatcgtctttccagccgcctttttgcgtttccgcttgtttatacatgtccttctcaattccgataaaagcgtctgcaatgacgccgtatgctttttcccatgcctgaatgacctcaggagcagccccgtcttttagcacatcctttatcgcgattaacaagtactttccaacgattggataatgctcgggcttaacaccgatactccggtgcttatggctgatttgtttgacgacggggactatgttttccagccggtcaatattggctgcggccgcaatcacagcattcgacaaggccgtacgctgtgtttttttcttttgattcgtctgattaaagatattcagcagctcagggtgatgctgaaaaagcaggtcataaaatcggcctgtgatttcttcaccatgctcttctaagaccggcactgtgcttttaatgatttcaatcgttttttcatcgagcattctgaaatccccctaaagatgtatgcatctcgattgacctgaaaaaagaatcgtttttgaattcttttttatagatttccccgttcaaaaagggttagccattccaatttgagacggattcaggaaaaaccagataaacgaaattgcggatggaaaattgtggacttgccatagtgtacttgtccgatgcaaaatcctccttttcagcatttaataaagtacgggaggtgagatgaatgggtaaaaaatcgaaagtgtattactgtgaccctaagtatattgtgactgacaagtatactgacaaagaagtggtttacgtccatcccatcaaacacattaacagagaacatatccgttatgttccccgccacgtttatcaggaagaaacaattcacgaagtcattgatccgggcgatccggggaaatgcgggtgtaaaaaggataaaaaaagacgcaaaaagtaattggttcgatttcttgcctcagcagacctccgtaccttttggctcctctttttcagaggggtcttttttcatgccgtatcttcaagcaaatacgttgtgaggcggcaatccgcctgatattcttgtcatatacaaattcacaggaggcatgatgatgagcaaaaaaatcgcagttctgatgacagatcaatttgaggatattgaatatacaagcccggcggaagcatttaaagaagcgggccacagtgtggtgacaatagatttagaagcagggaaagaagtgacgggcaagcacggtgagaaagtaaagatcgatcaagcgatctcagacgcagaccccaaggaattcgatgcgttattgattcccggaggcttttcaccagatcttctgcggggagatgaccgcccgggtgaattcactaaatcattcgtggaaaatcagaaacccgttttcgcgatctgccacggcccgcagctgctgattgataccgaccttcttaaaggaaaagatatcacgggattccgcagcatccgcaaagacttaatcaatgccggcgcacattataaagatgaagaagtcatcgtgagccataacatcgtaacgagcagaacgcctgacgatttggaagcctttaatcgtgaatcattgaacctgctgaaataagcgaataaaaatgcacagacccgttcagtctgtgcatttttttatggattgataaagaaacaccaatagttagacctattctcttccccatccataataagtaaaataaagagtgggtttttcaacactcgacgggaggttcacttatgtggatgatcattttgctgctgatcattttaatcggttttaccggtaatatcatttcgcttttgagagcgcaaaaacacgcatctcaaagaataattgagcttttagaaaagcaaggccgaaaataatcatgcagcgctgtgttacccgtaatagtaataataattccggcagatttcctgaaaaatgatttgatgccctttctcgttcggatgaagaccttctgacatgcacatgctgcggaaagcgggattatacgggtcgatgagatctgtatcaaacaggtcggcatacggtacagagaggagtgtgcaggcttctttttgggctttcacatagtcagccagcttcaggcccagtttatttttatcagtatcacggcggacgatttttccttttgatatttttgcttgtctcgttggggtcaccacaatggtgctcgcgcctttatttccgcttcgcagctgctgaatcacttgacagaagcctccgtaaaatgtggtgatatccttttcatctgtgccgatgggaatgtggttgcaccaatcatcatctgttccctggacaatgatgacatcatgtccctttgttttaagcgcttgctgataaatgttatcgcttccgtggttgctcatattaacgccgctgacagacagattggttatttcagcgtctgtccggtctttcagaatgtcaccaaagccgtattccgcgcgcagcccccgggcgacgctgtcacctaagatcgcgatttttgaagccttccgcagcctgcttatgctgatgaagtcaatgctgatatgcccgctgtccgtgatatgcaaaagcttgctgcttatgttttgcgaagagactgtctttccttcagagttataaaattcctcattcagcttcattcggcgtcatcccttcctttttatcctccggcatcttttttgacataaaaaacggacacgaacaaacagcgccatgttgtcagttcagtgtccgcagatgatgataccggatcttttatgcagttctcttgccattatagcagatctccattacttgtaatagagtctgcttcagcatttaaaacagcgcttgcgggtacgtttttgatgtgaccgtctgctgcgggaacggtgtgtccggcgatgcgtccgtcttctgctgcgggaacggtgtgtccggtgatgcgtccgtcttctgctgcgggaacggtgtgtccggtgatgggtccgtcttctgctgcgggagcggtgtgtccggtgatgactccgtcttctgctgcgggaacggtgtgtccgttttctgctgcgggaacggcgcgaacattttttggaaaccggttcttggtataaatactcccctaaaccttctctttccgcaacggcaactccatgttcaatttctttaacagaaatagcgttcaattctgttcacctccctttttctttacaacataacgtatgaaatgtacccctcacgtgtataagcttctctctcatatgagcgagaaatagtcatttatacaacaaaaagacccgtggaaacgggccttttgcaggcattttgcagggaacaaacgcaaacttaagatcgatttatttcttcctctcgctctccggctcggggtgaatcattacctgtgcttgtttgaattcattcgtaatagctctttcaatgcggtcacacaggtcgtgcacgtctttaatcgccacgtgagaggctacgaccaagtgaaaatcaatatactcctgcgggccggagcgtcttgtacgaaaatcgtgaatttcaataaattcctgttgaaatgtttcgataatctttaaaattgttttttcttcctcttccgacaaacgggtatcaatcagcggcgggaatgcttctttcattaacttaaacgcttcatatatgatatacaccgccagcaccatacctataataggatcaagtatgtaccactccgttaaggtaacgaccaaaaggcttgccgctacgcctaatgatgtgtacacgtcagtcagtaaatgcagggcattcgatttcattgccacggaattaaccttttcggcttctctttttacgaacttcgaaacgatcaaattaatgagagccccgcaagcatcacaacgattcccaatacgggcagatgaaccggagccgggttgaccagtttttgaacgcattcatatatcatccaaatccctgccgcaaaaatcagcatcgtctcgatggtccccgacagattctcgacttttccatgaccgtacggatgccctgtatcagccggcttttttgaaatcctgacggagataaaggcgatgaaggcggcgatcaaatctaaaaaagaatgaatggcttctgaaagtatcgcgacagatccggttattatccccaccactattttgagcatgacgaccagggaattgcttataaccgataaaaaagcgattttagaggtgttttccaccgtgatcctcctctttttgacttcttgtatttatcgtatcaaacggcattcgtgtgggtctacggcaacgtttttcacaaaagccatacatgtaactcatcataaactaagttggaaagcgacaaaacaggcgaacctttctttcagcactcaagtcccattgacaagatataaccgcttacattatagtagtttcatgaataaccactacggaggatgtttatggatgatgttctgaaagaattacagaagtttggattttctcaatatgaatgtaaagcatatatcggcttgttgaaacactcgcctgttaccggatatgaaatcagcaaaaggtcaggcgtcccccgctcaatgatctatgaggtattggggaaattagttgataaaggcgctgtccatattgtgccgtctgatccggttacatatgccccgctggccggaaaggaattaatcgaccggctccggcacgatttcgagagctcattcggctaccttgaggaaaagttattggcgctggaaagcgagcaggagatgaatgtcatccgccgcatcagcacaaatgatcatgtcatcaatgagatgaaggaaatgattgaaaaagccgaggaagagttgtggctgtctgtctgggaacagcagattccctttattcaagaagccgctaataaacgcgccgccgaacaattgcccgtcttttcgattgtgttcggccctccggaagtgaagctcggaaatacgacaaatcataatatgtctcctgaagtggcggagaaacggatgggcggaagattaacgatagctgcccgagataataaagaagtcttaatcgccaatttttctccgcagacgaatgcctgggccattaaatcagaagaccccgctctcgttctcgtggccatggaatatatgaggcacgatctgatgttcgcagagcttgtgaaagaagtcggggctgaaaaagttgaaggcctgatgaaacaaaaccattcgttatttcatgtcgtcaccggaaatcggttcatataaatgtgaaccgtattttctttgattttttcattagtcgttatcattataatctctatgaaaggagtataaaaaatgattaatacagaagtgcaaaaaaccgccgtttcccgggaaatgaacgatacgtttttacagggggtgcgggattgtgtgcctacgctgctgggctatatgagcatcggttttgctttcggcatcgtcggggttgcctctcatctaagcattcttgaaatctgtttgttatccttgtgtgtctatgccggcgccgcccaatttattatttgctcgctccttgtttccgggagtccgatttccgccattattttaacgacgtttatcgtcaatctgcgtcaccttctgctgagcctgaccatcgcgccgtatttcacgaaatactctctggcgaaaaatatcggcttcggggctctgcttactgacgaatctttcggagtagcggtgaacaaagcggctcagaacggcaggttatacgataagtggatgaacggcctcaatataaccgcttacatgtgctgggttatttcctgcgtgatgggcgggcttctcggacaatggatatctgatccttacgctctcggcctggactttgctttgcccgctatgtttgcggcgctgcttgtgctgcaattgcagtcgtccgcttcggaaaagctgaagcacagcctctccttaattctctatatgatcatttttatggtcttgttatcgtatttcgtcccgtcacacatcgcggtcatcgtctcaaccgtaattgtggcaacgatcggggtggtgacggacaaatgagcatcagcacacaaatgatctggattatactcggctgcatgattgttacacttgtgccgcgcattgttccgtttatatttgtccggaacattcagatgcctgaattggctttaaaatggctctcctttattccgctttgcattttgacggctctggtaacggaaaacatgattgtgaaaacaaacagcgctttgacctttgattggaaagcaatgatcgttctcatcccgacattgctttgcgcgatgctgacaaaaagcttatccatcacggtcatcacgggagtcgtgctgatggccgccgtcaggctgatatggtgacaatcaaaagcctccattccatagaatggaggctttacctttatgatgtcggattttcttcttccgtctctgattcctcggcttcggcgtttatgctttgctgctgttcccaatgatcccgctgcaatctttctttggcgatggtaaacatgaaattcacggcgcagcaccccttccctgttttgcttatactatgtactgtactcatttccccgtgcagtattcacaaaacataaaaaagcagcctgccgcatggagcggccggactgctttttattttcagtacgtgatcaggaagtattttttctttccgcggcgcagtacggtaaattgatcttcaatgcggtcttccgcagtcagaagatgcccgatgtccgtctggcgctcgccgttaatgtaaacagctccgttttgaatgtcttcgcgggcctgccgttttgaaggcgacagtttagattccactagcacgtctactaaagacagttcttgagagcggtctttttcaaacgaaggtacatctttaaatcctaccttgacgtcttgagcggaaagctctttaatattgccgctgaacagcgcctgggagatatgaacggcctgctcaagcgcttcacggccgtgtacaagaaccgtcacctcttcagcgagacgtttctgcgcttctcttttctcaggagctgtctccgttttttcagcataagcttcaatttcctcttttgacaagaaagtaaagtattttaagtatttgacgacgtcgcggtcatcagtattgatccagaactggtagaattcgtacggcgatgttttttctttatcaagccaaatggcgccgccttccgttttgccgaatttcgtgccgtcagcttttgtgacgagcggaatggtaagaccgaaagctttcgccccttcttcttctgattttctgatcagttcaagaccggccgtgatgttgccccactggtcactgcctccgatttggagtttgcagttcttttctctgtacagattcagaaaatcgtaggattgcaggatcatgtagctgaattccgtgtaagaaattccggtttcaattcttgagcttacagtatctttcgcaagcatgtagttaattccgaagttctttccgacgtcacggagaaattcaatgatgctcagctttccgatccaatcaaagttgttcgctatgacagcggggttttctcctgcctcgaaatctaaaaatcgggaaagctgatttttaattttttgcgaccattcgacaacgatatcctgagtatttaacgtacgctccgcttttttgccgctcggatcgccgatcagtcccgtcgcgccgcctacaagcgcaatcggatggtggcctgcaagctggaaacggcgcagtgtcaatatcggcagaaggtgtccgatgtgcaggctgtcagccgtcgggtcaaaccctgagtataaacggattttttcttcgctcagctgtttattcagtccttcttcatccgtcatttgctggattaagccgcggaatgataaatcctctaataagttagtcattttgtctgctcctttgtttatgaaaataaaaaacgccccttcgtttaaaacgaagggacgatataatcgcggtaccaccctactaataaaaacataaaaaagcttttatcactctttttgataacggaccgtgtccgttctttcactactgaaagccttggaatagctttgttcgcaaaagcggttcatgagtgtattcggcatatcttatgtgctgattttcaccggccatcagctctctggaacaatcagatatcctacttgtctcaatcaaaaccttttcgtatgaagcttactcatttttaacataaataagatacgatgtcaacgccgtctttaatcttccattgtggacaggtcgcctgccggcaggttcagctcccatgccttcagcacacgtctcatgatttttccgctccgtgttttcggaagtttatctttgaattcaatttcccgcggtgcggcatgcgcggcaagcccctgttttacaaagaggcgaatgtcctccttcagctgatcggatggctcatgcccttctctgagcgcgataaacgctttaataatttctccccggacagggtccggctttccgatgacgccggcttcggcaatcgccggatgttcaacaagtttgctttcgacttcaaacgggccgacgcgctcgccggatgtcatgatgacatcatcgactctgccttggaaccaaaaataaccgtcttcatccatataagcagaatctccggaaacataccagccgcccggcataaaataagaatcatatttctctttgttgttccaaatggaatccatcatcgacggccagccctttttaatggcgagatttcccattcggtacggcggaagctcatttccctgattgtcaacgatcgccgcttccactcccggaatcggtttccccattgagcccggcttgatctccatgcaaggataattgcagatgagctgtccgcccgtttctgtcatccaccacgtgtcgtggatgcgcttgccgaatactttatgtccccacttgatgacctcggggttcaaaggttctccgacactcaggacgtgacgaagtgaagtaaggtcaaatttggatgccatttcatctccggcgcccataagcattctgaaagccgtcggagcgctgtaccagacactgacaccgagcttctcaatcgtgccgtaccagttttccggactgaatctgccgccgacgatcacattcgccgctccgttcagccacggcgcaaatatcccgtacaccgtcccggtcacccagcccgggtccgcagtgcaccaataaatatcgtcttctttaagatcaagcacccacttgccggtctggtattgctgaatcatggcttcatgaacgtggagcacacctttgggcgttccggtagatcctgatgtgtagtgaagcaggtagccgtctcttctgtccatccattcaatatcaagtctcgtgctttctccctcagccgctttatcataatgaatgattttatctcccgcttctttgctgccgccgacaatgaaaatatgctcgaggtcgggcaggctgtccgccggaatccgttcggccagttcaggtgtcgtcacgacaacctttgcctggctgttcaacaggcggtctttgacggcgccttccataaacgcttcaaataaagggccggcgatcgcaccgattttaattgcgccgagcatgataaagtacagctccggcgaacgcggcatgaaaataaaaacgcggtcccctttttccacgtttccataccgtctcagtacatttcccgcccggttcgattcctccatcatttctttaaatgtgtatttttcattccgatttgcgtccttgtaatacagcgctactttgttttttcgaaatgattcggcatgacggtcaattgcttcgtacgccgcattcagcttccccgtctgatgccaggaaaactccgcttcgacctctttccaatcgaagctgcggtacgtttcctcataatttcgcagatgataattccccttttccgccggcaacgctttcaaattcatgcaacatcccctttgcttatctatagactaattatagtagatgttcacagttttctcaatttttaaaatataaattacaacactattgaaaacgctttatattttgttatgcttaagagagatgtgtttttattaagaaccgacaggcggtgaatcagtgaaacatcataaaacgtaccattcttcatcaattcagacagcagccggccctctattggtagaagggcccgttcctccaaaggacctagcacagtatgagtttcatgaaggcctgacagcctttcgccttcctcatgaacagcacaaagcgttaatcgagatcgccgggcttcctgaaggtcggatcattatcgccagggacggacagacgattatcggctatgtgacgtatttatatcctgatccgcttgaacggtggtctgacggcaatatggaagatctccttgagctcggggcgatcgaggtcgctcccggctacaggggctgttctgtcggaaaaacgttgctgacagtcagcatgatggatgaacagatggaacgctacatcatcatgacgacggaatattactggcattgggatttaaaaggaatgaaaaaagatgtgtgggaatacagaaagatcatggaaaagatgatgaatgccgggggtcttgtctggtttgcaacggatgaaccggaaatcagctctcatccggccaattgtctgatggcccgcatcggcaggcacgtcagtcaggagtcaattgaacagttcgacaggcttcgtttttatcagcggtttatgtattgactgacatacaaaggggataaaaagatgattgcagaacaaatcatgaaacgggacgtcatcaccgtctcaaaacacgactccattgaaacagccgtccgtaaaatgaaggtatatcatatccgccatctccctgtcatcgacgacgagctgcacgtcaccggtattgtcacagacagagacattaaacaggccggccccggcagcttcgaacaaaaggaacgcggcgcgtttctgacaaacaaagtggagaccattatgaagcggaatgtcatctgcgcccatccgcttgactttgtggaagaaatatccgcttccttttatgagcacggcatcggctgtctgccgattacggtaaatcataagctgacgggcattttaacgaaaaccgacgtgctccggactttcgtcagcctgacaggcgcggcccagccgggatcacaggtggaaatcctggtgacggatatgacaaaaagccttgctgatctcagctgcatgtgccgtgatcttcagctgcaaatcctgagtgtgctcgtctatccccatgattccgccgggtcgaacattctcgtcttccgggtgaagacgatgaatccgctcccttttatccgtgccgttcatgaagccggatacaatgtcttatggccgaaacatttgagggatcagccatgagagacagcgtttttgtttactcgccttcttatcagacgtatcaatttcatcaggatcatccgttcaatcagcagcgcgtgcttttaacatacgatctgcttcaggcggcggacgcgtttgacgatggagacatcgtcaaaccgcgcacggccactaaagaagagctggctctcgttcatacggaggattatatacaggcggtggaacttgcgggtgcgggccggctccctgccgcagaaggagaaagctacggtctcggaacggaagacacccccgtttttgccggcatgcatgaagctgcgtcgcttctggtgggcggcaccttaacggcggcagattatgtcatgacgggacaagccaggcatgcctgcaatttaggaggaggccttcaccacggcttccgcggcagggcgtcaggcttttgtatctataatgacagcgccgtggccatccaatacatccagaagaactacggggcaaaagtgttatacattgatacagacgcccaccacggcgacggcgttcaatttacgttttacgacaggtctgatgtctgcactgtttcttttcacgagaccgggcgttatttatttcccgggacgggacaagtactggaaaaaggaagcgggcaaggctacggctattcttttaacattccgctggacgctttcacagaggacgattcctttctccacgcttacaaaacggccgcctctgaaattgcggctttttttaagccggatgtgattcttacccaaaacggtgcggacgcccattattacgacccattgacacacctgtccaatacaatctccatttatcaggagatcccgcggctcgctcattcattagcccatcaatattgcagcggcagatggatcgcggtcggcggcggcggatacgatatttggagagtcgtcccgagagcatggagccgcatttggcttgagatgaaagggattgatcccggggagcgcataccgcagaaatggattgataaatggcagaagcattccccctgcacgctgcccgctttttggagtgatcctgaacaattatatcctccgattccacgcaaagaagaaatttcagaaaaaaatgcccaaaccgtggaaaaagcactttttgccatccggtctgagcagcggtataaaacaaaataaaaaacgaccttatgaggaggtcgtttttttgatcacgatttctacacggcggttttctttcatatgtccgggacttttgttgtccttcacaggtttcgtatccgcatacccggcagagataaaccgtttggcggaaaagtcttcattcgcggtaaaatactggatcacactcgccgctcttgcagacgacagctcccagttcgacgggaattgataggtggaaatccggcggctgtccgtatggccttctacctgtatgtcattcggaattgtttttaaaagcaccgcgatctgatgcagaaccggctcggcgtttttcagcacatccgcttttcccgtctgaaacagaacggcctcctgcagcacaagaaccactccgcgctcatcgcgcttcgccgtcaatttggaactcaaatgatgcgcttttatgtatgtcttcacgttttgtaacagcaaatcctgttctttattttcgtttgctttgtctgatgacgccggttcacctccgctgccgtttgtatgaatcgatgaaacggcagattgaaatttttccgcgtctatttgcgacatcgaaaaaagcaagataaagaacacgagaatgagcgtgatcaagtcagcgaacgtcaccatccatctcggtgaaccgccggaatgttccggtttgtttcttctttcaaaacgctcttttctaagcttcatggacagcgccctttttcttgttcgcaggctgtcctttacgccagtcttctcttgagctgaagacgacgagctgactttcgaggttgcggggatttttgcccgattggatgccgacaaccccttcgatcatgacctgtttgatgaaaatttcactttccgttttttcttcaagctttgccgcgattgggataaacaccaaattggcaagcagcgctccgtacagcgtcgtcaatagcgcaacggccatgttcggtccgagggtatgcgggtcatttaagtttttgagcatgagaacgagtccgacgagcgtcccgatcattccccaggcgggtgcgaaatcaccagctttttcaaaaacgcgtcttccttttctgtgtctttcttccattgcggcgatctcagaatccatcaccagccggatcgtttcctcgtcccagccgtcaatcgcaagcaaaagccctttttttaaaaacggatccttgatctcccgcgcctggtcatccagagacagcagcccctgcctgcgcgcctgctccgaaaggctgacaaatactctgacaagctctttcacattgtcatcctgacgggagaatacctgtttcagaacagaaggggttttctttaaatccctcggcggaaagctgataaagaccgccgcggcaaggccgcctgtgacgattaaaaaagaagtcagatccaaaaatgaactgattcccgccagtcccgtccctgacagaataccgattgcgacaataatacagcctaacataaagccaacgggcgtcagataatcaaaacgtttcatatcttctccttactcaagtaaaaaagcaagattccacccctcagagtgaagcttgcttttccgtttttttatgacttggttgattgtcttaattcgatgcggtgaggcaattcgacgatatgctcttcaaccggctctttgttcatcagttttgtcaaaagtctcatcgccacggcgccgatatcgtacgtaggctgcacgactgttgaaagctgagggcggaccatcaggctcaatctcgtattgtcaaaaccgataatatcaagatcatcaggtatcgaaagaccttgatcttgggccgcatggataatgccgagggccatttcatccgtcgcagaaagaatcgccgtcggtttccggtcaaggcccatcaagctttgaagcgcctccataccggaatcataagtgtaatcgccttccgctacgaattgctcgttaaacggaatcgccgcttcttcaagcgcccgtttgtacccttgcagttttttcgaacggttgatcggctcttgcatcggtccggagacgaatgcaatatcgcgatgccctttatcaatgaaaagcttaacggcatcataaatcgcctgttcataatcaatggcgacagaaggcgtctcgccctgttcttccactgatgcagccaagacgatcggcacaggagagcgcttaaattcttcgacatgctcgtccgtaatgttgccgcccataaatacgataccgtccacttgtttgccgagcatcgtatttaacagatgcagttctttctcaagattttgatccgagttgcttaagataatattatatttgtacatcgtcgcgatatcttcaattccacgcgcaagttccgagtagaaaatgcttgagatatcagggatgatgacgccgaccgttgtcgtttttttgcttgcaagccctcttgccaccgcgttcgggcggtagccgagccggtcaatggcttccaatactttttttctggtcgtcggttttacattcgggttgccgttcacgacgcgggaaacagtcgccatactgacatttgcttctctggccacatcgtatatcgtaatgttgctcactgaaaccactccttttactggatacacttatccttatctatagcataaacactttatgtaaagaaatgtcgtacgatttcgcattctgtcgtttatgattgtaagcgtaagtcagtagtgtacattatttttcattattcatcaaatttaaatatctctcatgaaattatacacgtttttcccaatgatgaaaacgttcactttcattttataattaaataaaatgaagatacgaaaaaaaagccgcgcgaggcggcctttaaagagcggaacgttgtattatgcttttactttcagcatcggctttaattcgttcagccatttctcgaattcagggatatccatctgctgcgcagagtctgaaagggcaacggaaggatcagggtgtacttcggccatcacgccgtcagcgccgatcgcaagcgccgcttttgctgtcggaagcaggagatcgcggcggcctgttgagtgtgtgacgtcaacaaacaccggcaagtgagtttcctgtttcaaaatcggcacggcagaaatgtcgagtgtgtttctcgttgccgtttcgtacgttctgattccgcgctcacaaagaatgatttggtcgtttccttgtgacatgatgtattcagctgcattgatgaactctgaaattgttgcggcaagaccgcgttttaacaataccggctttttaacggaaccggcggctttcagcaattcaaagttttgcatgttccgcgcgccgatctgaatgacgtcaatgtaatcaatcgcttgctcaatgtgggcgggcgttacgatttcactgatcaccgcgaggtcatattcatcagcgacgcgtttaagaatttgcaggccttctacgccgagaccttggaaatcatacggacttgtgcggggtttaaacgcgcccccgcgcaggattttaatgccttgttttttcgctgcggccgcgacttcggcaacctgctcatagctttctacggcacaaggtccgacgatgaatctctgatcgccgtcaccgattttttcacctttaatgtcaacgatcgtatcttctgcttttttcttccgggagacgagcaacgctttgctgtgatcctcttcttgaagttcaagtccggctttgaaaatttctttgaaaatatgctggatcgttgagttttcaaatgggccgtcattgctttcaataatgcggttaagcattgtacgctctctgacagggtcaaatcggttgacaccctgtgcttcctttgctttaccgatttcttttacaacggctccgcgttcattgattaatttaaggatttctaagtttagtgcgtctgcctgctgtcttagactctctaattccttgttgctcatctttttcatcccttctatgctatgttttattttaatggttaacatgcatcttactacagttatgcgaaaataggaatatgaaataataaattttttcacattcgactttatcacaaaaacgcttttaagcttttatgcgttgaagcagtatatattgatatcctacatgatccggctgaaatgatcaatagtttttttcaaaaaaaaaccgccggtatcaaccggcggccagcaattatgaaaggtgctgctctattgcgttttttgtgatttgtgaatgagacgcgtgccatttcacttcgccgtttgtaataacgaatacttgcgggctttcatgtttcacgccgtatgcctcggcgatatagtttgaaagcggccggctgtcctgcacatgcaggtaataagaaggtacttctgaatgctccgatgcaaaggcgtcaaactcctgaaacgcggcttggctgatcgggcaggttgtgctgtgttttaaaaacacgagcgtgttttctttctcagcggcatttttgaactcttcttcagacgatatcagctgttttgtcatgtcggttatctctccttattgaagatcagcgatttgcctgaccggctttttccccggcgtcttccgcttcggccttgatgctttgggccgtgtcctgcatttcgcttctcgtctcttcggctttctcggttagtgtgctcttagaacggtcttttaaatccttcactttattcataatctgacctgactgatcagctaccagctgggtgatattagatgttttgtccttggcgatgctgacatattgagagcctttttctttcgcgtcggccgtcattctgtccgtcttatcctttaacgcagaagcctgactgccgagatcgtcgcgcagctccttacctgatttaggcgccagaaacaacgccgttgtcgcgccgataattcccccgatcagcgttccgattaaaaaatccttactattgattccatctttgctcattatgattcctccttagtggatttttcttatgattaaagcgatgtttttttcttttgcttccacttgtcccatatttccatagcggcctggctccaggtgacaacctgactgatcttatcctgattctctcttacagaggccgtaacagaacctgctgcctgctttatggatgtattaaactgctggacggaagttcccacttcctggacagcatggacaaccgtatttaatttctctgatttttcctgaatgtcttccgcgagacggtttgtcttatgtaacagctcggttgtctctgcggtaatgcctttcatctgcccttcaaggccgtctaaagtcgaggctacgtttgttaaagtcatctgcacggactttaatgttttggacagatagatgacgaggatgagaaatgcaacggcaatgagtgcgacgcttaagtaaagaatgatgatcatctaatacctccttaatgcaggatatagtggtatatacccaattcttaaaatgataaacatatatgaaaggtctgtatgtatactatttctccgtttatcggtaaatccctttgcagcacgcgcaaaaaagcagtgagagccccactgctttttcgttacgctatgacgttttcataggccctcatatatttttgaatgtctccggcgcccatgaagatcagtactgcgccttcatgcgcttttaacacggaagtgtcattttcttcaatgagttctgcgttatcgattttttcctgaagatccgtgatcgtgagcttgccgacgttctcacgggcagagccgaaaatgtcgcacagatacacgcggtcggccgcgcttaagctttctgcgaattcatccaggaatgattgcgtccgtgtaaacgtatgcggctgaaataccgcgatgatttcacgttcgggatatttttggcgcgccgcctcaatcgtgactttgatttcagtcggatggtgggcgtagtcgtcgatcagtacctggctgccgatcactttttcattgaatctgcgtttgacgccgccgaatgattcaagtccgagcttaatcatgttcacgtctatttcttcatagtggcagagcgcaatgaccgctaaggaattgaggacattatgatggccgtatgccgggatgtagaacgtatcgtaaaacgtattgcggacaaagacgtcaaatgtcgtgccttccgtattttttacgatgtttctcgcttgaaaatcgttttcttctcccgtgccgtaataaacgacaggcacattggcgtgaattttcggcaggtactcgtcatcaccgcaggcaatgatgcctttgttgacttgaagcgccatgttttggaaagcatcaaacacatcgtcaatgttggcgaaataatcagggtggtcaaaatcaatattcgtcataatcgcataatcaggctgatagcttaagaaatgacggcggtactcgcaagcttcaaatacaaagtattcgctgctttcatttcctctgcccgttccgtccccgataagaaacgaagtcggcttcgcctgctgcatcacgtgtgccaagaggcccgttgtggacgtcttgccgtgtgcgcccgttaccgcgacacttgtgtattttttcatatattcagctaaaaatttatgatatctgatgacaggaatcccttcatcgagcgcctttgcaatttccggatgagaatcagggaatgcgtttccggcgattaccgttaagccgggtttgatgttatcggcgctgaacggatagatcgggatatttcttttttcaagggcagcctgagtgaaaatctgcttctcgatatccgatccctgcacctgataccccgtatcatgcaggatttgagcaagcgggctcatacctgtcccttttattccaacaaaatgataaacagtcataatcgtacctccaacaaacgtctatctgttccccagtatatgacgctcatttcattttgcgaccgcagcgggcgaaaagcccgcacagcggcgcttccatttatttttacgttatcgtcagtatctgtaactttctttttgattaaacctgccgcatgatatttcagcgcgtgacagtgatgcagttttgatggtccatccactatcataccatgtttgtgagaaaaatgaacgatattcttattcttgagaaatgtcagcggccgtaatcagcacttcacgcggtttgctgcccttcgcttctgagatcatgccttcggcttccatcatgtcaatcagcctcgcggcgcggttataaccgattctgaaccttctttgaaggcttgaggtgctggcgctgttttgctccacgacgaattggcacgcctcaggaaacagttcgtcttcttccttaagggcggttccctgcctgatcagttcttcctgttcaaacaaataagaaggcggcagctgctttctgacatgagagacgacgcggtcaatctctctgtcggatacaaagttgccctgcaggcgcaccggttttccggtaccgttttcccagtacagcatgtcgccttttccgagcagcttttccgctcccgccatgtcgatgatcgttctggaatctacctggcttgagacggagaatgcaatcctcgtcggtatgttcgccttgatcattccggtaatgacatcgacagacggacgctgtgtcgcgacaagcagatgaatgccgcaggctctcgctttctgcgcgattctggcgatgctttcttccacatcgttcggcgcgaccatcattaaatcggcaagctcatcaatgaccactacgaggtaagggagcttttcgcctgtcttatgatcggccgttaattcattaaagcgtccgatatctctcacacccgaatgggcaaacagttcataccgccgttccatctcttccacaacccattttaacgcggcggtcgcggctttggcgtccgtgatgacggggctgaccaaatgcggaatttggttataaggcgcaagctcgaccattttcggatcaatcagaagcattttgacatcactcggatccgccttataaagcagactgaccaaaatggtattgatgcagacgctttttcccgatcctgtcgcacccgctatcaacccgtgcggcatctttttcaaatcaatgacgaccgggtttccggaaatatcgacaccgagcgcggctgtaagcggagacggattcgtcctgaaagcggcgcttctgatcatctgccttaaatcgacgactttgcttacgcggttcggaacttcaatgccgatcgtgtttttaccggggatcggcgcctcaatccgaatatccttggcagacaggctcagtttaatatcatctgctaagtttgtaattttgtttactttcactccgggctcaggatgcacttcaaaacgtgtgacggacgggccttgtgtgacatgaacgacttgggcgcgcacattaaagtttttcagtgtaacgtttaaaagctcgcgctgttcttcaatccacgattggtcgtcatgtctttgcgccggcggtacgtccagaagcgacagattcggaaagacatagctcgctccgccctctggcgtcttcgtctgcttgtgtttatcgcttttaagcatcatgacgttaaacggaacattgcgctctttcggctgctccgcttttctcacagtctgaggctgtccgtgatgctccgttttttcttcggcaggccgggatggggcatcggtcgtctcaatgcttacaggttcaggctcggggtctgaatgccgctctgcttcattgtactcaggctgagagtctgcttcctgtttcgcgtcgggttcagctgattcgggcttgtcttcagactgcggctgaatttcctcgtatccgggttctgtgtatgtatacaccggttcttctgcggtttcaaaaggcggtgctttttccggctcaggctcctgatgttccccctccggcgccgcttgttcctctgtgttttcagccgttcgggatgcttcagactcaggctctcttataggctgcgggcgggtttgttcatgctcttgttcttctgtaaagccggcagactccgcgctttcggtgtgctccagctcttcagcctgctgcggttctggtgctgcaaacacttgctcttttgcattctcagcctccgtgtgaagctcctcttttttaacggccggaatttcttccgtttcttgtttcgcaaacggttctggccggtcattcgtctgttttgttataccggatgttgtgaagacgggctctttttccgtttcctgaccggattttggcggaacaaattgctcctctgacagcaatgttacgttctcttcacgccgcttttcggaaataggcgcttttttgatgctgtgctgagattgaaagccgtaaaccggtgaaggaatggatgacggtttaaagggctttttcaccgtatcaggctctttatgtgtatgctgtttccgctccgtttgctccttcccggcggcataaccccgggacggctggcggcgttcgtgcctttcccgctgtctttggttttgctccgttcgcttatagccgtccggaacgaccgggaagcggaaattccctttcggatattcgtaatatattttagaatcttccatgcgcgttaatttgccttctggctgatccggtatttgctgtttctggatttgggcatgcgtgttcggttcacgttcatgctcttcttctttttcacctaaaaataagtcaaaaaatttattcagccaactcatgtttaatcactctctaactccctttttagtagtctgggacgatatttagtataccattgccgggcggctcagaaaagattaagctcccaactgaagaaagccgttaagcaggcctgcttaacggctttctctcacatcattcgattctgtgcgcttatttatgggagttagaattgaaatgcttcgccggcctcgcggctgtcttcaagaacaagaatccctttttccgccggcgcatccggcaaagcgagttctttcgcggagcagatcatgccgcttgacggaacgcctcttaattcagcgtctttaatcacaagtccgctcggcattaccgcaccgactttagcgacgacgactttttgccctttgtccacgttcggcgcgccgcaaacgatttgaagggtttcctctccgacattcacttggcagatattcagtttatccgcattcggatgtttttctttcgattcaacgtgaccgacaacaaatttcggagaaaggtcaaccgtcagcgtttctgaaacgccgtttctgttcagtatttcattcacatcctgtacgaaagtctcagacaaagcgacggggccgttgtcttcaatctgtaagtaagaagacacgttaaaaatgttaaagcccgtcgtttcttttgtttctttgttaaagattctgacgacatcgccttctctttcatagccgatttcttcgcgtgctgcatctttaagagagatcagaagcgtatctcccacaccttctttattgtaaaaagcgttcataagaaaaatcctttctaatcctttttcggccggcttttcgccatgataaacacaggttccagtctgccttcattatacagaaatgaaagggccgtaatcggcaccgtgccgcttgcaaagaagctcatggacatttgccctaaaatatcataacccgattcatttcgaatgtcagcaagtattaatacatcctgatgcgggacggaaatcgccaattcgccttcagcggcctgcttatattcatgaagaatcgaatcattgagaatccggctggcgtcatagccgtcattcgccctgaaaaaataaaaataattatccgcaaccgtatcctgtttcacgaccgaaggaagagagcggagattgaatgacgccgtctccctgatccgttcttttgtccagttttctttctcgagcatacggctgtcaattaggcggtacgtcttgccgaggtcaagcgcgtagtagattctcgtttcggccgtatggtcatcatacacgagcggaatgccgtcgctcgtttgatcgggaaatgacgtggagcggatgaccggatagattccggcttcctttccggacatctcctgtccgcttccttccatcgcctccatcgcttctgacacatagtagacgatttcgtcgatcgcttcttcttttttcgtctcccacttcgcaatgatcggcgggagctccaatgtgatgccttttttggtcgtttgatcctcaacacggagggtgtctttttctctgtcaaaaaagaaggatcggttctcgtgctgcaggcgctgttttaataaatccgccagcttccttgacgtcattttcaaagcccgtggcctcctttatgctttagcaagggaatcggttaaaaattgctcaatttcttcttttgttttacggtctttgctgacgaagcggttcacttcttttcctccgttaaacacaacaaagctcggaatgccgtaaatttcccattccgcgcatgtatcaataaattgatcgcggtctacgtagtaataagtgaattcaggaaagtccgcttccagctcagggagaaacggctccacaaagcggcagtccgggcaccaatccgctgaaaacataaataccgcccaatcgtcttgtaccgctttttgcaattcttccgtgctttcaatctttttcattgtcattcctccatctggattatgagttttttatatgctgatgtttgtccaattggatcataccagactgtttacggcaagaccaactatatgcaatatcattatcatatttcatttgcattatcaagcaagtttcgtttaccattttgcttgtagccgtacgaaaatctgaatatgtacataaggaggggcaaaagatgcagtttgtcgtgtatttagcgggtgaaatccacagtgattggcgggatgaaatcaaacaaaaagcaaaagcgctgaacctgccgattacgtttgtcggtccgatggaaaaccatgaacgctcagacaatatcggagaagagattatgggcgtgcagcccgattctgttttaaaagacgccagagcttctgatatcaacaatttccgtacagaggtgctgatggaaaaagccgattttgtgatcgccctgtttggcgagaaatataaacagtggaataccgcgatggatgcttcttatgccatcgcaaaaggaaagccgctcattctcatccgtccgaaagaacttcatcatccgctgaaagagctttccggaaaagcgaatatcacggtcgaaaccgtcaatcaagcgatgaaagcactctcttatttatttgaaacagaataagcaggccgcttttatgcggtcctgcttacctacactcaccacttcagtattaatcagttcaagaggaaagtttatatttgtcttttttgtcataatcataccttcttgcagaacaaataaaaatgcaaatgactcgactttgtgaaatcgctgctcctctcaatgcttgcagcatgtttttgatttaaaaacgtttatcattgcaataaaggttcgaaggttgtttatctggatcggaaccattttgataataatattgaaaaataatatgtgttacctaattctatttacaatacgctttacacttatattcacaacaaagaactgtctcgatcatgcggcttaaaacagaatgtaaaaacagcagtcaataagtattcaaagggacttattgactgcttattttttttacacattttctctgatcgtttcgaccgtctgtttgtcactcgccatgaccagcttaatgagcatttctttcgccgcggcataatcatcgacatggatgatagcggcatttgtatgaatgtatcttgaacaaatgccgatgacggcagacggaaccccgctgtttgatatgtggacgcgtccggcatccgttcctccgcctgaagcgaaatattgataagggatattgtgcgtttccgccatatcaaggacgaactctctcatcccgcggtgcatgaccgtcgttctgtcgagaatgcggagcagcaccccctcgccgagacggccgaacagctccttatcgccgctcatatcatttgccgggctggcatcaagcgcgaagaagagatcaggctgaatcatgttggccgctgtctgcgcccctctcaagccgacttcctcctgaacggtggccccggcgtacagattgttcggcaggtcttttccgtgcagctcttttaatagttcaatgcttaacccgcagccgtagcggttatcccacgctttggacaatattttcttctcgttggccatcggggtgaacgggcagaccggcacgacctgctgtcccggtctgatccccattttgaccgcgtcctctctgtcatcggcaccgatatcaatcatcatatttttgatctccatcggctttgcgcgctgggcatccgttaaaatgtggggcgggatgcttgagatgacgccgataatcggtccgttatccgtctgcacctcgacacgctgggcaagcagcacctggctccaccagccgccgagcgtctgaaatctcagcatgccgttatccgtaatctgtgtcaccataaacccgacttcatccatatgcccggctaccataacggtcggcgcatcttcagcgccgcgccttactccgaaaacacttccgagtctgtcctgcacgatgtcatccgcatatttcgcaagctcccgtttcataaaagagcggacctgatgttcatttcccggtgcgccgggaagctgcgtcagcgtccggaaaagcgttttcgtttcctcattcatattttcccctcatttctatgtaatgcttttattttattagaaaaacaaccgttttccaagcgctcagattgaatgggctgtaaaaccgccgctttacttaacaccgtctggcatcttctgtataataaaaactacgacataattggaggtgcttcatattgaaattacgtcattttctcttaggtgcaggagtcggattatgcgctgccatcgcagtgaaaaagtatgcgatgaaaccttatatctcttcagaaaaagcgctccgtatcgtgaaagcggcttttaaacagcgcgggccgatagacggatcatggatttacacagagccggagccctaccaggtaaacggagaaaccatccaggtatacaaaaccggcgtgacacgttcggcattcggcgaactggagcaatatgaagttatggtcaatgcaaaaacaggccagattgtcgatgtcattgattctgtcgcctcataattcggacaagcaaaaaataaagcccaaaaccatcagcgttttgggctttattcggttacatcggccgaattcgtttatatacggggttccacatcgcgtcctgaaccgcttggatcagatcctcgggttccgtttccgctacaccgtcctgaatcgcagctttagctacagctaccgccacggttgccgataccgtcctgagatcctccactttcggaagcatcggcgcgcccggcttgccgacgtccaccataccggcgatggcattcgcgcaggcaacgaacatattgtccgtaatgagccttgcttttgtcacaatcgttccgagcccgagtcccgggaatacgagcgcgttgttcgcctgtccgatatggtaggtaacgccgttatacgcaacaggcgggaacggacttcccgttgtgacaagcgcgcggccttccgtccatttaattaaatcttcaggttttgcttctgataatgtcgtcgggtttgacataggcaaaatagccggccgtttgacatgtgaggccatttctttgacgatttcttccgtaaatgcgcctgaaacggtagatgtgccgatcaggatcgtcggcttggcctgtcgcaccgtctccgccagatcaattgatccgccttcaccgctgcggccgtactctttcacttcatcagcagggcgggcgtacggaacctgaaaatcacgcaagtccttcatatcatccgtcaacaatccgtttctgtcgatacaccaaaagcggctgtatgattcttcttcgcttaatccgttatgcaccatagcttcgcgcagctgctcagcaattccgataccggccgttcccgcgccgaagacgacgactttatgctcttttaaaggcacttttgatgctttcgcacacgctaaaacagctgcaagcgacaccgcgcctgttccttgaatgtcatcgttaaacgtacagactttatctttataccgttttaatatgccgcgggcgttagccgtgccgaaatcctcccaatgaagcagcgcattcgggaatgtttcccgggcaagcgagacatactcatcaataaagcggtcatatttctcgccgcgcactcttgaatgttggtttccgacatacagcgggtcatttaagaggctttcttgatttgtccccgcgtccaaaacgaccgcaagcactcgtgacggatcaattccggcggccgccgtatacaccgcgagttttccgacagaaatggcgatgccgccgacgccccagtcaccgattcccagaatgccctccgcatctgtcgcaacgatcaagtcaatgttttcattttttccgaactgctgaaatgcggcgcgcattccttcagggtcatctattgacaaatacagaccgcggggttttctgtactcgtggctgtaacgctggatcgcggtgccgacggtcggcgtatatacgatcggcagcatttcgcctaaatgatcatttaacagcctgtaaaataatgtttcattccgatcatggagagcggtcaagtacacatttttgctcagctcatcaggctgcgaactgaattgttcgtaggcccgcctcgcctgctcttcgattgtcaatactttcggcggcagaaatccctcgagcccgagttcctttctttcctcctgtgtaaaggccacccctttatttaaaaaaggcgtagaaagcacttctaatccgcgcagagttgttttgatttctccatctttcgtcacttgaaattgattcacctgtctcttcctttcaaagcaatttgtcttaggtttgcttttattcccgaaattcatacaggtaaatcatcgatccgcttattttctctcccgtttgacagatgcagccacttcgccgtcttctccccattttaccgctctgtaaatcgcgtcgtgatagaaaatcagccaggcgcctttttctgccgcgaacgtctgccatttctgcttttgcggaatggaggtcatcggataatcatcataggccagcacccataacggatttttatgcgcattcgtcggcatcaggtcggcaaaatgcacagccgtctccccgccgtcttctaagacgatgacactgtggccgtcgctgtggcctccggtgtggtgcatcgtaatgccttctgtcagctgatactcgttctcaaaggtttcgacctgatcttgtaccgcctcccaattttctctccaatatgtatttttcgatctgatattagggtttctcatttcgcgccactctgttgcagaagtgataatgcgggcattcgggaaaacagagacaagctcctctccgctgtattccgtcaagccgcatgcatggtcaaaatgaagatgggtcatcgccgcaatatgaatgtcctcacaggaaagcccgagttcacgaagagagtgttttaaattggattcctgtgttacaccgtaattccttttttgtttatcagaaaatttccctctgccgatacccgcgtcaaccaatatattcaggccgtttgttctgatcagaatcgggtctgttcttaattcaatctggtttttgtcatttacggggtattttctcgaccataaaggcttcgggacaacgccgaacatcgctccgccgtccatatgtgttacaccgccgtccagccatgttaatgaaatattcccaatattcaatgtctccatcttgatccctcctgatataatggtagcaaatggcggcataaaaaaacagactcccgcatcagagtctgtcttttgttctccattcaacttcggcccggtaaatcggctggccgagtgcggagaatttttcttcgtattctgtcataatattgcccttcggatcgctgttgtgcagatctaggctgacttctgtcagaagcaggccgtattcggaaaagcttttcagagagtattcgaataaaccgcggttatcggttttgaaatgaatctcacctgtttcgcccatcacttcttcgtattttttcaagaacgttttaaatgttaaacggcgcttttcgtgacggtttttcggccacgggtcagaaaagtttaaataaacgcgcttgatttctccccgttcaaatacgtcattcagtgtttccgcgtctatatttaacaaacggacattatgagccccgctgtcctttactttttggacggcagtgacgatgacgcttttaaacagctcaattccgatatagttgatatccggattctgcttggccattcctgaaatgaactgcccttttcccgtaccgacttcaatatggatcgggttgtcattgccaaagaccgtattccaccgccctttatactgggccggatcactgatggcgatgtcagcgttttctgccagaaaatcattcgcccaaggtttatggcgcattctcatatgattgacacctctatctataatttcgagtaacaacataccatgaaacataaagagccgcaagcgccttttaaaggcgccggccgcataaaaaaagaggctccccggtccggaacactcatgtgatgcataaaaccgcaccgctttgcacaatgtatgacacagaaaggatgtgtatatgaatcatgggcttaacaagcgaacatcaggtccggttattaaaggacatattggccgaccatcaattggattgctgcggcacggttgccgagtatgaacagctggagcgcgtcatcaaatcactgatggccaacaccgggcttgattcaaatataaaaaacgtgctcgaggatgtctaccgctacagccagtccggcatcacggccgattccatcgacacgcatattcaggagcaccaaaaccatttgtcccaatgggtggagcagatggattcgtactcctgactacttgacaatccgcttcatcagggcatgaagctcttccatggcatcatgatacgctttgtcgtttccttttgatttgtgccaggcgatgaaggtgatggtctccgataacatgtaccacgccatccgcagccgaagcccttccgtgagcttcatgccgtacatcccaagccagctgtcccacgctggctcttcgacgtaatgatacaataaagggccgagatccatggccggatcggctatcatggcgccgtcccaatctattaaatacagctggttgtcttcagacagaagccagttattatgattcacatcacaatggcaaacgactttttcaccgaattgcacctgatccacatgagcttccaaataagcaaggccttcctgaataagcggcgaaaattgccgcacggcaaagacggcctgcttcagctgcgacaaaagggcgcccggatcaagcggttcttttcccaatcttttcagcatgtcgagcaaagcttttgatgtgtggattttgcggagcagctcagccaccgggcgtccgctcatatcctttgccttcagctccctgcccgccatccaatgctgagccgtaatgacgtctccgttttccatccgttttgtccaaaccagcttcggaacaatgccttcggcggataacacggctaaaaagggcgagctattacgttttaaaaaaagctgttggccgttatgtttcgcataatatgcatctcctgtagctcctccggcggggaagatctcccaatcgctacctagtaattgtcccaaccagttcatatcaatgttcaacccatcatttcttaaaatattttagaataggcctccagcctttctctattggcggagcggcctgtcataaacaatttcatgagaataaaaaagacagctattgagagtctcatatgctaatcaatagccgtcctataaattttagcgctacagcacaaacttcgtcaagcaaaactagcaagaacacctgtgaattctgaagatttatgccgcgaaccgctctgttgccgtgaaacaattgacgggtttcatttgtttattatgtttttattttcaatggcgcaccgcccggcataagccgaaacggcgtcgttccgatcagctcgccgtcagcgtgaaacggaattttcccatctgtttcaaaaacgaattccttcccctttatcatcgtcactccgtccattttgatatgccggccgaagctcatcgcccataaaaaacgatacagcgaaaaaaaggacaggttttctgcaatgacaatatcaaaatagttttgacggggatttgctgaaggcgccgctttcatgccgcctccgtaataagggtgattagccgcaataacaaaccagacattgcggaattcacgtctctggccgtctgccgtgcaaacaaatctgaacggctgaaaccccgaggccgtatgtaaatgcgcgagcgggtaaatcacaaagccgagacgcaaaaaccgaagaacgcgcgaaaacggaaaattcgcggctgccttcaaaactgaggcatcgaagccgacagacaggtggttaataaaatagagtgattgcgctttgtcatgaaaaaagttgatgtttcccgcaaaaaatttccgtgtgagcgggcggtgcagacttttgatttcttggaggagcgccgacttcttaataccgagccctttggaaaagtcattgtacgaaccggcgggcacaaaggtcagctcaatctgatccgttcctttcagtccgttaatgacttcatgcatcgtcccgtcaccgccgatgacgaacagccgcttaagcttatgatcctgcatcattgaaatctgtcttgccagcacctccgcatgtccgggatgcccggtcaaaaaagagcggtggctgaccccgcgcctggtcagctctttttgaactgatttccagacacgccggccccgcccgcctcctgagaccggattaataataaaaaaccattgactcatcgtttgttttcacctgcttcatagatgaagagacagccggcaaacgtccgctttaatcaagccattcctgtctccggcttgaatcgctcaagccgtaagacaaaagagccttcgccgccttcagctggtggtgcttgatcggcgccgtatttttctgctgcttttccagccaccctgccgcagtccgtttatcagctatttccagcccgtacggcggctccgggtaatcaatataagacgttctgctgagcaaaagcttccgcacgggaatgtcggcctgcttttcttttacgatttgcgaaacgaccgagcccgtccggtgcaggctgagagacggattcaatacttggcgcgtgctgccggagcctctttcttcccaaaaacggtgttttgatccgatatatacactgtcctcttccgcttccataaaagcggcgcagaaaatctccagcggcgagatgatgataatgctcagttcgacggacgcctgctgaatttgcagaaccggatgatacatcacaaaataggaatcgggcagtttttgagccagcatttttaacatcctgtcccttttgaccgcctgcgaaagctcagacttttgagaaagcgtggagctcgcccattttaattgaaagtcatacagctgatctttgaaaaaaggcgcgagctcagacttttgagacggaagattcccgaacagcgcctcttctccctccggttcatcaaaccattggtgcctcttttcatttatatcggccgtattttcttcttttctcttttttaaggaaaattttttcctggccggcgcttgatcggtttccccgccggcagccgtttccgtttcttccgttatccggtcaaacgcttcaagaagcgcctcccagcgttctttcttcagccggataaactggttcatataatggtatggatcaagttcatatctggatatgcagtcgtgaattttgatgatctgtgccatgtgatttctccactccgaatatttgtttatgtcaattgaaactgtgcgatttcttcgtatttaggcgaccggtcaagatgggtctgaaacagggaaaacctgctgacggcactttgcaccctgccgctttcaaacggcacatcgtcagaaaacggccggtctcccgcccacttccgcgccatcgtcatatgagggtgatacggccgtttttccacttgaaaaccggctttcaaaacagcctgttttgttttttcccgcaaatcaaagagcagttcattccgttcgggctcaaggtgaagcactctcggctgtctgcggtcgccgaaaatatccagatgctgaaactgtacggtaaacggctgcgctgccgacgcagcatctgcgagcagagacgataatttcgcaagccgttcttcatccgcggctccgagaaaaatgagcgtaatatgatagtcatgcgggtgcacccattttttgaatgataacgccggctcctttttggctgcttcccaaatcggttcagcaatgtcagccggaatcggaatgccgataaaataatgcggcaatgaagctttcatacgaggatctccccctctttggttatggtgttattataaaacggataagcggagaggagaaccctgtccgctcattatgataggatattatgtaccgaacgttttatacagaaaggaatgagccggccttgaaaatcgtaaacagcacggcggagctgatcggcggcacaccgatcgtaaagctcaatcgccttcagccagaacatgcagcacaggtctatttaaaattagaatcgtttaacccgagcggcagtgtcaaagacagagcggcttacaatatgatcattgaagcggaaaacagcgggcatttaaaacccggctctgtcatcatcgaaccgacaagcggcaacacaggcatcggcctggcgatgaacgcggcggcgcgcggctacaaggcaatcctcgtcatgcctgacacgatgacgaaagaacgcatcaacctcctgaaagcgtacggcgcggaggttgtgttaacaccgggggcggaaagaatgcccggcagcatcaaaaaagcgaaagaactcgccgaacagattccgggaagttttatcccgatgcaattcgataacggcgcaaatccagatgcccaccgaaaaacgaccgccattgaaatctatcaggccgttcagcagctcaacagaccgctcggtgcttttgtggcaacggcgggaacgggcgggaccattaccggaaccggagaaacgctgaaagagcttttcccggatatgattgttcatgtcgccgagcctgcgggatctcccgtcctgtctggcggaaaacccggcgctcataagcttgtcgggacaagccccggatttattcccggcatactgaatcaggacgtttacgatgaaatcatgaaaatatctgatgaagatgcgtatacgacaacacgtcgtctggcccgggaagaaggcatactcgtcggcccgtcttcaggcgccgcctgcttcgccgccattgaaaccgccaaacgcctccctcccgaacagatcgtcatctgtatgacggccgatacgggagaacgttatttatccacggatttatggtcatttgaatgataaaaagggatgccgctttcggcgtccctttttattatcacttggcaagttcataaatggcttcggcatataaagccgttgacctgagaaggtcatcgatttcaatgtactcatccttttgatgcgcgctgtcaggccggccggggaacagcggaccgaacgcgacgcccgccgaaagggatctcgcatacgttcctccgccgattgaaatcagatccgctttctttcccgtctgtccttcgtaaaccttttgaagcgtctttacgagcggatgatcggcagaaacgtggtgcggtttgctgtctttaaattcttcaagccggaattcttcagcagacgtaaaagcatcacggatgactttgctgtctgaagtgacgggataacggatgttgatgccgagttctccatcctcaccctttctgtatgtaaaggtgccgacattcaatgtaagctctccgctgatgtcatccctgcaatcaattttcagctttttgcctcgtgtatcatttaaaaaatagtcactgacggttttgacaaagtgctttccggctccatccagctctgttccgttaaggcattcagcaagctttaagccggcattgataccattatccggttccatcgcgtggcatgatttcccgtatacccgaagcgtcagttttccattttccgaaactgcttcaccttgtgtttttgactgctcaagccatttgctgaaatatgcgtgcacggcatcaataccgttcccttcaataaccgcttcagccgcatccggcaccatgttcaagcgcagtcctgaacggaatgacagaagcacgttttttgcgtctttgtcagaagcgttttttacaatgcgcagtgacgcatctataattcctttttccgcgttaatgatcggaaaatctgcgtcaggagcaaagccgatgtcaggcattttttcgtgtttgaagtagtgatccacgcatctccaatcactttcttcatccgttccgatgatgattctcacgcgtttggataaaggaagctgcatgtctttgacgattttcagcgcataaaacgccgccattgtcggccctttatcatcaatggcgcctctggcatatatccggccgtccctgatatcggctgaaaacggatcgctcgtccagccgtctccgggcggaacgacatcgacgtggcacaaaacaccgacgatttcgtcacccgttccccattcaatatggcccgcatagccgtcaagattctttacggtgaagccttcttttttaccgaattccagcagtgacgccaggctggcattgacgccttctccaaacggccggccgggaccggctgttgattcgtccattacgctgttgatctgcaaaaacttctgcgtgtcacggatcagatcttctttgtttctgatgacttcaacttcccagttcatcacaaatcccctttcttgataaagacttgcaaaatgtcgataaaacgaataatatagatgatgttttgaaaaaatgttcgtcattggaggtacttatgtttcatctcgacaagcatcaaacgacaataaaaagagaaattaccgcgggattgaccacctttttcacaatggtgtatatcattgtcgtcaatccggtgatcctttccaatgcgggaattccgtttgaccaggtgttcaccgcgacgattatcgcttccattgtcggaactttatggatggctctcgctgcgaattttccgatcgccattgcccccggcatgggcttaaacgcgtatctcgcctttcacgttgtcggcacaggcagcggcattacgtatcagacggctttcagcgccgtttttatcgcgggagtcatctttattattttatcgttaacgcctttaagaaaacaacttatagaagcgattccggacaatttaaaatacggaattacgaccggcatcggcttatttatcgcttttatcggcttacgccaatccggaatcatcacggctgataaatccaatctggtcgcactcggcgatcttcattcgcccgccgtcattttaacgcttatcggacttatcatcagtatcgtgctgatggtgctgaatgtaaacggcgctctgttcatcggaatggcgctgaccgccgtcattgcctttttgaccggacagatccattttgcgaaagggttcatttcatttccgcgcctgccggaggggcttttaatcacaaatccgttcggtgccctcggggatgtcgtgcatcacggtctgtacgccgttgtgttttcttttcttctcgttacgatttttgacacgaccggcaccatgatcggtgtcgctgaacaagcgggattgatcaaaaacaatcagctgccgaatgccagaagagcgctgttggctgattcaacggctacgacggtgggaagcatcttcggcaccagcccgacgaccgcgttcgttgaatcttcagcaggtgtggccgccggcggaagaacaggtctgacggcgctgacgattgccgttatgtttgccgtttccatgtttttcagcccgcttgtcagcgtcttatcggaagtgtccgcgattacgtcaccggctctgattattgtcggcagcctgatgatgggtgctgtgtcgaatatccgctggaatgagcttgacgaagcgttcccggcctttctcgtcattttggcgatgcctttaacgtccagtatttcaaccggaatcgcactcggcttcatttcatatccgcttgttaaagcagctaagaaaaaatggcgcgaaatccatcctctagtcctcatcttcgccgtgctgttttttattcagctttttattttgaacggacattaagaaaaatccctttccttttcggaaagggatttttacatataaagaacggaaagaatcgcggcaatgagacaccaggcggaacagatgatttgaatgacggttaatgcactgtttcgcgcccggaaatagtcatcactgtctctcttgataccgcttaaaaccggtttatccgtgatccggtcaaataaaagtgacgcggcatagcggctgacgatcgcaaataaaataaggactgccggcttcactaagagcggaagaacgagaataagagccgtaaaagccgcggttaaaaggtaaagctgccggagatacccgccgtttcggatcagcactttaaaaaacaattctttccacgccgtatacgccgaccgttttgtaaagatgtgctttgagccgggatataaaaacggcttgctccgccctttatttttaccattcgggagctgcacatcatggctgagcatcaaaactgaggcggcgagtgaaagcttccgcctgttctcctcaagcacttcttcctcaaaggctgataatgtctccgtccctttccaagtcaaaaaagcggaacagatgaacaatatacatcccgccggccaaagccaataccattcggcggcaaaggtgatcataaaaaacgcacccgccgtcagaaccatcactttcagccagcccgccgcctgattcccgaatgtccgcctgctgttttttctgtgccggtgcaccgctaatatcgcggtatggaagccgaacagacagcaaaacatacctgaatatgccggtaaggtacagtcaccgtactggcgccataagggaaataacaatacggcaagcgcaccccatttgataagggaaaggaacatcgaatacaaaagcgcgtaccgtttcagcttttgcatcagatgttttgcatgcaccaaaaacacgtgatccgcttccagcaaaaaggtatgaataaaacccgtgcacaacagcaaggcactgaatacatacagccagccccatcctaatactcctgccgctccattaagaagccccctgccgttcagccattcagcatattgataaacggcaaatgcggcagcgggaagaacgatgtacagcgcgaccgtccaatcaatgaccgtctgaaacaccttccattgataccgccaataatgaaacagcctttgaaaaaacaaagcccgcccggtcatcgctgactgctccgaaccgctgaataaaagcaatccagcagtgaacggctccccgttttttcctgaagctcctctaacgtgccttgaagaagcagagcgccctgatccagcaaataaaaccggtcgcagattttttccgccgtatccagaacatgcgtgcacatcaaaattcccgcgcccctttctttctcagcaatcagcatgtcggtaaacagcttcgttgagatcggatcaagtccgataaaaggctcatcaatgatgtaaatatccggcttcgccaaaaatgcctgtataagcatcatcttttgctgcatcccttttgaaaaaccggaaggcaaatcatgttttacagacgtcagcgaaaactcttcaagcagccgccctgcccgctcacggcactcttccccttctataccccgcaatgacccggtcagctcgaggtgctcccaaagcgtcagttcatcgtaaaaactcggccgctccggtatgtaagcataagatgaatcattccactcaataccgccttcaatatcccgggacagcccgagaaccgcctttatcactgtacttttccccgcgccgttcgctccgattaaaccggcaatttcaccagcgttgactgacagagatacatcggaaatcaccttcggcctgtcagcataaccggcgcagacaatgtttgcattcaataattctcccaaacttctcactcccccgctttcatacggacatgtataaaaaaagtttcagtttccataatattaaaagcggtccggacatagtaatgcaccaaggctgcacccatttggaaaaaattatctgcgcttattcctagattcatgtcgtccatatcgtgtataatggaggcagttaaaagagaaaaaaaacagaatgtcatcctttgttgcttattcgtacgaagttttagagtcgaaagttgtggtatatcaagtccatccgatcttatgatagggagtggttttttgaaaccttcaacaaatcgtatgctgactcggattaaatcagtttacatgttcatccaggaaaaaggccttgtgacaacacaggaactggttgatgaattcggcattacacctagaaccattcagcgagacttaaatgtgttagcatacaatgatcttgttcatagtcctagccgaggcaagtgggagacaacacgaaaaaaagtgaaaattacatcttaagcgaacaattacataaggcccttttcggcctgacatgctgcaaggcaaagcagcgtctttgccttgttttttgttcctctatataaaaagcccaaaacaaatctgttttgggcttttctgatatcgattacacttcagcgcctctcagcgtttcgagctcctcttcagtcagctcgcggaattctcccggtttaagatccgggtcaagagaaacagcccccatcgaaagccgcttcaaataagccacttcatttccgacagcctttgccatcagcttcacctgatgatatttgccttctgtaatggtcaagtgaatcaccgtttcatccgggttttctgtaatgatttcaacggctgccggcttcgtcttatagcctccttcaatgacgacgcctctttccagatgaacgatgtcttccgatgccagaggtgaagttaaccggacctcatatgttttaggcacatgctttttcggagaaagcaggcgatgagcgagctgcccgtcattggtgagaagcaaaaagccttccgtatccttatcaagacgtcccgccggaaacggttcaaatcgctgttcttcaggcgtcagcagatcaaccaccgtttgctggcggctgtcttctgtagcggacagcactccttgcggcttattcatcatgacataaataaattcacgatagtctgccggctctccgtataccgtgatgtcctgtttttccggatcgacatgggttttcacatctttcgccggctctccgtcaatcatgacagccccggccttgacgatttttttcacatcttttcttgagccgaatccgctgttggcaagcagcttatcaagtctcatcctgatcctctcctttaaaaagaaaagcccgcgataagcggactattcattatttctcaatgggcggaatgcctgcctctcctcaaaacgcggggcagacggtttccaaacattttctgtaaaaatccgattcggtacgcggcaaacatgtacaccgcaccgccgacagcggcgcagacaaagacgacaatcgccgcatgcacctggccgctttggtatgttacaaagaaactgagcagccattgagtcagcttgaccgcgactcccatcacgacggacaggactgcgattaaaatgacccgttttataagtaccgtatacgaatagcccgcatggcgcttaatcatgataaaaccgtacagaagagaagcgatataaccgagcgccgttgccaagatggccccgtctccctgaaacagcttgatcagcggcacgttcagcaccacttttataatgacgccgatgaaaaggctcacgacagcaaatttctgcttattaatcccttgcaggatcgcggcgtttacggtaaacagagaaaacagaatcgcgacaggcgcgtaccagaacaatatatcctgtccgatatccgggcgaagactttcagagccgtagaagaacgtataggccggacccgataacacggacatcccgacaacggcgggaataaccaaaaacagaataatttgcatcgtctggttaatctgctgattcaaaagcttataattcctgctcgtaaacgattcagtaatcgtcggaatcagcgtcagaccgaaagcggtcgccagagaaaccgggatcatcacaagcttcggcacataaagggtgacaatcgcaagcatgtcctggctgatatccttatggcccgccgcaatcatcgctttattaaacgtattcgtatcgatatatgaatacaaaggaatcgccagtccgacaaatacgtaaggagcggcataactgaaaagctcaatgaacatttttttataacttaagttcgcagacgggacgagattcggcttcatcgccagaagatcgcccttccgcttattccagtaaatataaaggacgacaagccctccgaatgatccgatcagcgccgcgaaagtcgcgtatccgactgcgatgacaaggccgccgttgatcactcttaaaatcaaatacgttgcgcccaataaaaagatgatccgggcaagctgctccacaacctgtgaaacggctgtgggccccatcatctgatgaccttggaaaaaaccgcgcacaaggctcataatcggcacgaccaaaagtgccagactgaccatccggatgacataaacgacgtggtcaatcgtaagtccgttgttactcgtgccgccgagagatgtttccgcaaaaaacggcgccgaaatataaagaattgaaaaagcgatcatcccggttacgagcataaccgacattcccgctctcagcatccgcctgctcgtctcatagtctcctttggagttatatttcgagacaaattttgaaaccgcggcgggaaatcccatcgtggcaatgtttaaaaacagtgtatattgattatatccgtattgaaacaaagctccgcccgtcgctccgaccatcgctccgaacgggatcagataaatcatccctaaaatccgcgatatataggtgccgagcgtcagcacgaacgtgccccttaacaatttgcttgacatgtttcctcatcaccattttctacgaagattcaacttttctattttaacacaactgggcaattagacggtaataattacagcgggaaactttttgggaaagctcttaaaaacaaaatacgtttaaggaatccccttctttcgctataatagcaggaagcggacatttccgcctattatacgtgaaaaagaaagttgttgatgaaatatgaaacattatgacgtaattgtgatcggcggcggcccgtccggtttaatggctgcgattgcggcaggcgaagaaggggcggacgtattattaatcgataaaggaaacaagctgggacggaagctggcgatttccggcggcgggcgctgcaacgtgaccaaccgcctccccgttgaagaaatcattaaacacatccccggcaacggccgctttttatacagcgcgttttccgaatttaataatgaagatatcatcgccttttttgaaaaactcggcattcagctgaaagaagaagaccacgggcgcatgttcccggtgacggacaaagcccaaagcgttgtcgatgcgcttttgaaccgattaaaacaactgaatgtcaccatccgcacaaatgaaaaaatcaaagaggtgcggtacgagaacggcaggacagcgggcattacgacaaacaatgacgaacacattaacgcagacgccgtcattatcgcggtcggcggaaaatcagtcccgcataccggcagcaccggagacggctatgcatgggcggaagcggccggtcataccgtgaccgaactctttccgacggaagtgccggttacgtcgtcagaaccgtttattaaacaaaaaacacttcaggggctgtcccttagaaacgcggccgtcagcgtcctgaataaaaaaggcaaacctattgtcacacacgtgatggacatgctgtttacccatttcggcttgtcaggccccgccattctccgctgcagccagtttgtcgtcaaagaactgaaaaagcagcccgatgtcaaattacgcatcgatctgtttcccggcatcaacgaggaagagttatttcaaaagatgcacaaggaactgaaagacgcaccgaaaaaagcgctcaaaaacgcactgaagccgtggatgcaggaacggtatctgctttttcttctggaacggaacggtcttgatccgcagacaagctttacggaactgccgaaggatcaattcagggcttttgtcaaagactgcaaacaatttacggttgccgctgacggaacgctttctttggacaaagcgtttgtcacaggcggaggtgtttccgtaaaagagattgagccgaaacaaatggcgtctaaaaaaatggaaggcttatatttttgcggagaaatactcgacattcacggttataccgggggctacaatatcacttcagcctttgtcacggggcgtctcgccggtttgaatgcaggacgtttctcacgctcgctgtaaatggtttaaagcgcatttacctgagcgtccccgttgataattgaccaaaaacatgatacagttttctgcgttttgtttcacctgattgagggaacaggaagaaaggaatgatctgcaatcgtgcgaccatactaaaaaatggcgtattgaaaaaaatagtcagagggtgagaacgtttgaagaagaacatctccagtgttttttggattgtgattgtcatcacagcagctgcggttttatgggggccatttctcctgacagcctgcagcaagtcactgatacggcacaaaaatttattacggattctttcggctggtattatctgctggtcgtttctatatttgtcggtttctgtctctttctcattgtgagtccgatcggcacaataaaactcggaaaacccggggaaaaaccggaattcggcttattatcatggtttgccatgcttttcagcgcgggcatgggaatcggtttggtattttacggggctgcggaaccgatcagccattacgccatcagctctccctcaggtgaaacagaaacaccccaagcatttcgtgatgcgctccggtacacgtttttccactggggactgcacgcttgggccatctatgcggtcgtcgctttatgtatcgcttattttcaattcagaaaagacgcgcccggtttgatcagcagcactctgacaccgcttttgggcgataaagtaaacggcccgatcggcaaagcaattgactgtatcgcggtgtttgcgaccgttgtcggtgtggcgacaagcttagggctcggagcgactcagatcaacggcggtctgcattatttattcggcattccgaaaacattttccattcagctgatcctgatcgctgtcgtgaccgtgttatttttgatttctgcgtggagcggaatcggcaaagggattaaatacttaagcaataccaacatggcgctcgcgggtattttaatgatctttatgctcattgcaggcccgacagtgctgattatgaactcatttaccgattctatcggccaatacatccaaaatatcgtgcagatgagctttcgcttgtctccgaatgatccccaaaaacgcgaatggattaacagctggaccattttctattgggcctggtggatatcctggtcgccgtttgtcggcatttttatcgcccgtgtatcaaggggccggacgatccgggaatttttaatcggggtgttggtgacaccttgtatattggctttcttatggtttgcgattttcggtgtatccgcgatggatcttcagcagaaaggcgtattcaatgtcgcgggaatgtcaacggatacgatgctgttcggcgcactcagccactatccgctgacaatggtgacatccgtattaacgcttattctgattgctgtattctttattacatcagcggattcagcgacatttgtgcttggaatgcaaacgtcttacggctctttggacccgtcaaaccgggtgaaaatcatctggggcgtcatccagtccgccgtggcagctgtattattatattccggcggtctggccgcactgcaaaacacggccattctcgccgcggttccgttttcagtcgtgatccttctgatgatcgtgtctctgtacaagtcattagcgagcgaaagaaaaggaatcaaacaagcggagaaataccaaaaaccgagaagtccccgcgtcaaaaaagcataatgcataaaaaagcccggtatttcatccgggcttttttattttcggtataaaatgagagcggaaaaacaataaagctgctcaccttcaggatcacaggccgccgctaccgtatatttaatatcaacgagctgttcatcagaaatcccctttaaaaatgtattgacttcagtctgcagatccttttcatgctcctcatcaaaaacagctatcttcagcacatcaccctctcctttctctatcaatttattccggttcaattgaaatatgatagagaaaaacagattttcttttttactgatttttactaaaagtaaccaaaaatagttattgaaaacgcttactaatatatgataatatcattttaacaataaccaggtcatttctgtttagtaaatatttagtaaaaaggagatacgaaatggtccgtctcaaagatattgccttacaggcatctgtatccagcgcgacagtatcgagaattttgaataaggatgactctttggccgtgactgatgaaacaagagaaaaagttctgaggatcgccgatgagctgggctatcagccgtcggcaaaaaaacggaagaaccgcagccgcagcgattcagcccccctgatcggcgttgtcagctgcctgtcaccggaagaagaacggcaggatccttatttttcagcgatccgaaaaggcattgaggaagaatgctttcggcaaaaagtttttatcacatcttctatccatctcgggtcttttcaagagcatatgtttcacgatctggacggcgtgatcgtaatcggcagcctgcaagacgaggcgcttacgaatatcagcgccgctttcaggcacgcggtatttgttaacggcacccccgatcccgcccgctacgattctgtcagcgtggatttttatgccgcagcgcaaaaggcgatcgaacatcttctgtcgctcggttaccagcggctcggttatatcggcggccgggaacgggagcataccgtcatagacggtgtaaacagcaataaaacgattgaggataagcgtctgaccgctttcttacaaatggccggagccgggccggagcatgtactgatcggcgaatacagcatgcacgaagggttccggctgatgaatgaagccatcaaaggcggaagtctccccgatgccttttttatcgcaagtgattcgatggctgtcggcgctttaaaagccttgcaggaagccggccttcaagtcccgcgcgatacggcaattgtcagcttcaacggaattgatgaggcagaatacgccagcacgccgttatcaacggtaaaagtatacacggaagagatgggccggacgggtgtcaaattgcttctcgaccgtttaaacggcagaaccgtcccgctggccgtgacgctccccacttcattgattgtcagacaaagctgcggctcacaagaaaggaggtgacatgtcccgcagcgtttatatcatatttaaaggaggaaaagatgaaacgcttactggctttgtttctttcttttacttgcatgatactacccggctgctcggcagaacagagcggcgccggagaaaagcagaaaacattgacagtctattccacaatatcctcagacagcgaacgcgccgtattcagaaagttggctgattcattccaaaaagaacatccggacattcaagtaaacgttcatttcccaggcaatgactacgaaaatatgatgagggtcagaatggcagccggtgacatgcccgatcttttcgacacacacggctgggctaaaatccgctacggagaatataccgccgacctcagcggcatgtcttggacgaagcggctcgatccgaatttaaacagcatgctcaaagacgccaaaggcagaatatacgccttccctctgaatcaggcaaaggacggactggcctacaaccgcacaatgttggaaaaatacagaatcaaaccgccggaaacaatggatgattttatgaaggcactgagacagattaaagaaaaaagcggcggaacagtcacccccttctggtttgccggctatgagaaaagctcatttgcccaatattacgatcaattcgccgcaccgcttctcatcacagatcccgcacaccgttacaaaaaacagctgttaaacggaaccttccgctggacacacttcacctatttatctgacaaactgaaagagatgcaaaaggaaagcctgctcaatatagatgccgtgacggcaaaacggtcccagctcattgaactgatggcgcaaaacaaaatcgcctttacgctgcagggcggcaccctcggccaagacgtcgctcaaatcaatccgaaggtaaaagtcggcatcataccgaccccggccgtccacaagggagacgcgccggtttggatcggaggcgaacgttacacgctggcggcattcaaggattccccgcggcttgaagaagcgaaacagttcatcgcatttatggcccgtcccgagcatgcgaaatcaattgccgaagcgacctcgcttccggccggattagtgaatgtgcaaacggacattttctacgcaaatgactataagcgctatcagcatattaaggtgcagccttattttgaccgcctttatttgccgaacggaatgtgggatgtgatggggacagccgggcaggagctgacggccgatatcttaacccccgcggaagtttcggcgaaactcggcagggaatataagcggctccgtcttcaatctgattcacaaggagctgacaaagaatgagtgatcttgcaagagaaacccaaggatttcagcatcaaaagccggtaaaacccgcgtcactgtggtggatgtacgttcccgctcttgccacggtttttattttcatgatttttccgtttgtcaaaggcgcttttatcacattcacaaactggaacggcttctcacagacgtatcaatgggtgggggtcactcaatataaaaggctttttacagatccggacacgtggcttattgtgaaaaacactttgctttacggcatcggaagcactttttttcagaatatgctcggacttttatatgcgctgcttttgaatcagagcttaaaaatgaaggcgctcacaagaacgatcgtctacctgcccgtcattatcagtccgctgattatgggatacatttggtattttattttctcatatgacgggggtgcgctgaatgatgtactgggcgcactgggaatcggtcctgtcaacgccttggcaagccctgcggcaaacccgtggattatcgtcatgattaacacgtatcaatacgcaggcattgcgatgattgtatatttggcggggctgcaaagcattccgaaagattattatgaagctgcaaaaatggatggcgcgggaggtcttcagccgtttttcaccatcaccctgccattattgatgccggctgtcaccatcaacatggtcatcaatatcatcggcgggctgaagctgtttgatgtcattttcgctctgaccgcaggcgggccgggcaattcctctcaatcgatgtcgacgtttatgtatgatttatattttaaacggcaggatgcgggatatgccgccgcccaaggcgtgtttatgtccgttattattcttgtcatcagcttttcggctctcgtgtatttcaagcgaaaggagacggaaatgtcatgaaaacagcccgaatgcggatttttacgctgttggctgccgttatctcgtgcgttcattttgtccccttttatattttgctgaccacgtcattaaaagcaaaaggagactacagttcaaaatggtcgctgccatccgccttttcatttcagaattttcgtgaagcatgggagcgtgcctctctcgggcaatcctttctgaacacgatcattattacagccgtttccgccgccttgctaattttcatgggttcgcttgccgcatacccgctcgctagaagaaatacaaagctgaacaaaatcgtcttcggccttttgatttccatcatgattatcccgcctttgacttccatggttcctttatacaagatggtcgctgatgcggggctggtcaatacgcatgccgcagccattctcattaatacggctgcatatatgccgctgaccgttttcttatattcagggtttatccgctcttccattccgaaagaacttgaggaagccgccaggatggacggcgcgggattgatcaggactttttatacaatcgtgtttcctttgttgaaaccgattaccgcaacggtctgcattatttcctgcgtgtttatctggaacgattaccaatttgcgattttctttttacaagatcaaaaggtgcagacattgaccgtggccatggcggggttcttcggcgaaaacgcgaacaatcttcacttagtcgccgcagccgcaattatggcgatgctgccgatggtcgtattgtttttggcacttcaaaaatattttatctcagggctgtcctccggggcggtcaaaggctgagaagaaaagggaggaatttctgttgaagaaaattacgtttatcggagcggggagcacgattttcgcaaaaaatgtactgggggactgtttactgactgaagcattaaacggatttgaattcgcgctttatgatattgacgctgtacggctgaaagaatctcagctcatgctggaaaacatgagagaccgctacaatccgagtatatccatcatctcctacgatgaccgaaaacaagcgcttacacacgccggctatgtgataaacgccattcaggtcggaggctataaacccgcgacggtcattgactttgacatcccgaagcggtacggtctccgccagacgattgccgataccgtcggaataggcggcattttccgttcccttcgcaccatccccgttttatttgacatcgcaaaagacatggaagaggtctgcccggatgcgtggctgttaaactatacaaatccgatggcctctctgaccggagcgatgctcagacatacaaatgtcaaaacggtcggcctgtgccacagcgtccaggtctgtaccaaagatctgttcgactcactcggcatggatcacgaaggtacggaagaacgcattgccggcatcaaccatatggcttggcttttggagattaaaaaagacggaattgatttatatccggaaattaaaagacgggcacgcgaaaaacaaaagacgaaacataaggacatggtgcggtttgagctgatggataaattcggctgctacgtgacggaatcatctgagcataatgccgaatatcacccgtattttataaaaagccggtatccggagctgatagatgaactccaaattccgcttgatgaatatccgaggagatgcgcggaacaaatcaaaaactgggaaacgatgagagacgggatcatcaacaaccaaaacctgacgcatgaacgctcgaaagaatacggttcgagaattatagaagcgatggagacgggccgtccgttcacattcggcggcaatgtgctgaataccgggctgataccgaatctgccggcgaaagcggtcgttgaagtgccgtgcgccgccgttaaaaaccaaattatgccgtgctattccggcgaacttccggagcagctcgcggcgctcaacagaacaaacatcaacacacagcttttaaccatcgaagcggccgttacattaaaaaaggaagccgtatatcaagcggccatgcttgatccgcatacgagcgccgagctttccatgaatgacatcatctctttgtgcgatgacttatttgaagcgcacaaagaccggcttccggcttatcactgatcattcgcgatccggtcccgggcgggccggacgtttttatatgttcagcaccagtttgaccgtctgtaaggtgtgtcctttaaaatcttcttcaaattcacataccctttgaaaccctttcgcttgataaaaggacaaggcgatgcggttctctttttctgcatggacataaagcttttttaccccgccggactgcctgatgcattctttaagaagtgccgtgcctatcccgcttccctggcaatccggatcaatatagatggcggtcagctccgcatttccgtctttttgaaccggggtggcatttgcaaaaccgagcactcgcccctcttcttccgccacaaagaacaaagaatgcaagagccggcgttccatcatctcatcctgataggcggattcgagaaactgatcctgaatgtgtctgggaataatcccttcatacgtatgatgccagctgcgttctgcgacttgccggacctgtttgatatcgtttgttttcatcgcgcggatcatcggtttcacctgattcgcctcccgttttttttataaaaaaagaagaaaaagacgcacgtcccttttcttctttcacttcaaagcgttatttcttcggctttgtttcgccttcccactccagcatgccgccttcaacattaactgtacggaagccctgctcatgtaaatacatacaaacgttcatgcttctttttccggaacggcagataaatacatattccttgtccttgtctaacgcatccatcttctcagggatgtcccccatgcggatatgaacggcctccggaatcattccttcggcaacttcttcgtcttctctgacatcaatcagatacagctcttctcccgcttttaatttttcttccagtgcggctgtgctgatttcatttattttcaatgtgtgacactcccattcatctttatggtgttaagtataccaaagcccgcggtgcaatttctatgatagaggcctgataaaaaagcccctctctgtaggagaggggcttcgtccggtcagtttgccacgatattgacaagcttgcccggtacggcaataatttttcggatcgtttttccttcaagctgctcttttactttttcgtcagcttgtgcgagctgttctaacgctgctttatcagcatcagccggaaccattaatttcgcttttacttttccgttcagctggacgacgatttccacttcatcgtccaccagttttgattcgtcataagcaggccaagcctcgtatgcaatcgaaccttcgtggccgagtttttcccacagttcttccgccaaatgcggcgcaacaggagaaagcagcttcacaaaaccttcgatatattctctcggcagttcattcgctttgtaagcttcattaatgaacaccatcagctgagaaatgcccgtgttaaaacgaagggcttcgaagttttctgtcactttcatgaccgtttcatgatagacgcgctcaagagtttcgcccgcgccttctgtcactttgcccgtcagctcgccgttttcctcgataaacaaacgccatacgcggtcaaggaagcggcgtgctccgtcaaggcctgattcagaccaggcgatagatgcgtcaagcggccccataaacatttcgtacaggcgaagcgtatctgctccgtgagacgccacaatttcatccggattgacgacgtttccgcgggatttactcattttttcattgttttccccgagaatcatcccttggttatacagcttttggaacggttctttcgtcggcacgacaccgatatcatagaggaatttatgccagaaacgagcgtacagaaggtgaagcacggcatgctccgcccctccgatgtaaatatcaacgggcagccatttatccagtttctcaggtgaagcgagctgatccggatttttcgggtcgataaagcggaggaaataccagcagcttcccgcccattgcggcatcgtgttcgtttctcttctgccttttctacccgtttcaggatcagtgacttccacccactctttaatgttggcaagcggtgattcacctgttccgctcggtttgatctcatcggttttcggcagaatcagcggcagctcttccgccggaacggctgttgacgtaccgtcttcccaatgaatgaccggaatcggctcgccccaatagcgctggcggctgaacagccagtcacgcagacggtatgtcactttcttctcaccgtttttcgtttcttcaagccaggcgatcattttttcaatcgcttccgctttattcagtccgttcagaaagccggaattgacatgttctccgtctcccgtgtacgcttcttcttccgtgtttccgccttttacgacttctttgacaggcaggctgaacactttggcgaattcaaaatcacgttcgtcatgcgccggcacggccattacagcgcccgttccgtaagaggcgaggacataatccgctatccagatcggcagcttttccccgtttgcagggtttacggcatatgcacctgtgaagacgcccgtttttgttttcgcaagatccgtccgttccaggtcacttttcgcctgaacttctttaacataagcgtctaccgcttctttttgttcaggcgtcgtgatggcctccacaagctcatgctcaggagccagtacggcataagccgcgccgaacagcgtgtccggtcttgtcgtaaacaccgtaaacgtgtcatcagtgccgtcgatcgcgaaatgcacgtttgcgccttctgagcgtccgatccagttgcgttgcatgtctttaatgctttccggccagtcaagttcttctaaatcttcaagaagcctgtccgcataagcggtgattttcagcatccattgtctcatcgggcggcgttcaaccggatggccgccccgctcgcttttgccgtcaatgacttcttcgttcgcaagcaccgttccgagcgccgggcaccagttgaccggcacttcgtctacgtatgcgagccctttttcgtacagcttggtgaagatccactgcgtccacttgtaatagtccggatcagtcgtattgatttcacgatcccaatcataagaaaatccgagtgattggatctggcggcggaaattatctatattttgttttgtgaactcagccggatcatttcccgtgtcaagcgcgtattgctcggcaggaagcccgaacgcgtcccatcccatcggatgaagcacattgtacccttgcatgcgtctcatgcgagaaaggatatcggttgccgtatagccttccggatgtccgacatgaaggccggctcctgaaggatacggaaacatgtcaagcgcgtaaaacttcggcttgtcattctcttcactgacggcgaacgttttatgatccaaccagtaattctgccatttcttttctattttttcgtgctgaaaactcaacgtaaaaacctccttctgattgaatacggcgtatgtagtccaagtattgacgggatgaggaagattatattcagattattctaaaactaaaaaaaactccctcatccctaaaagggacgagagatttttgtttcccgcggtaccaccctcgttagcgcggttttaagccgcactcacttgatacttttaacgcagttatgcgtcagcggttttgccgctgcaactctgaggcgagttcggaaacagacttgattgacttgcaccggccgtcaattctctgagtgcgaaatctgcttcttactgctcctcttcactgttcttatcgctaccgtaatcttacctgtattttatagaattctgttcataagtgcaagcaggtttgtatacaatgggaatgtacccggaacgggtcgtgagcggggatattattttgatggaggatttttttgctggtgtggttttgcttcggccgaatcactgttttgttctctgacaaaatcaaagctcctgagaacagcttctccgccgtagcctgcgattatggataagatgacgagttgaattcctgaatcggggtcagcggataagacaagtaagatggaagcagccattccgataaaaccatcttccaaaaaaccgagatagataaaccgctttgtcattctgggtttctccagcctgcctctctttttcacatgaccgagaacccccatgatgcctccaattacacaagcaattattacctgatgcagcatcttcatcaccttcctaaagcccttatttagtaaagcgacttcaggccatccagcccccttacgaatacgatgattttcgatatctacataccggcgattgagcaggaaagtaaaaagcttgtttcttccattatatgtgaacacatgatcggtaagcttgatgcattagattcatttttcacccagtgacaatgacctagtcacttacttagcgatgatgtgccttccccttatatattcagtgtatatgaggacaagcccgaatgacaaattgcaaacttcggctgcttgaatcagaacatatgttatgctacggttactgtagattcatttaaaaaggggagaaacaacggctgaaaaaagcgcgcagctttacggccaaaagggggttttacatggctgactcaaatgtatccggaaaactggagcagctggagcttatcaaaaaggcgcttgatcacgcacgcatcggcgtggtgattacagacccctctcttgaggacaatcccatcatatatacaaatcagggatttatggatatgacaggctacgcttccgaagagatattaggtaagaactgcagatttctgcaaagcaaagaaaccgaccgtcaacaagtcgcgaaaataagaaagagcttaaaccagaaagaaaagatcacggtgcggctgaaaaatgtcaaaaaagacggcaccccgttttggaatgaactcaacattgatcctctgtatgttgaagacaagctctattttgtcggttttcaaaaagacattacagagcagaaagaatacgaaaagctcctggaggattccctcacagaaatcacgacgctgtcaacaccgattgttccgatccgaaacggcatctccgccttgccgttagtgggaaacttaacggaagaacgatttgattcaattgtgacaactttgacggacatattaaccgcatctaaagatgattacttaattatagacttatcaggtttggccgaggtaaacgaacagacggcagaccagattttcaaattgcaccacctgcttaaattaatcggcacagaactgattatcaccgggatcaagccttccctcgccatgagaatgaatcagcttgatgccagcttttcttcattaaagacgtatttaaacgttaaggacgccgtcaacgtgcttccggtcgtataaacaaaaaaatcccgctgtttcggcgggattttttatgtcgtcatcgcacttggatgttttgtttattaacggttttcaggcgtttgtcgtacagcaccgtcgctgcgatgctgacaacaagaagcaccatcaggatcaacagcagcacgctcatgccgtactgatcaaccagcacgccgccaaggagcggcccgatcattctgccgcccgtcgccgcactgttgacgaatccttggtaaaacccttctttccccttaggcgcaagctgattggcaatggtaggaacggcaggccagacaagcatttctccgacggttaaaatcaccattgcggtgaggtacatcggaaattgcttggcgctaagaagcacgccgaacgaaacgataaaaatacaaaagccgatgaccatctgcgtttttaacgcgcctgaccattttttcagaacagctcctatgagaggctgtccggcgacaattaatattccgtttacggtccagagcacactgtataatgaaagcggcataccgatgctttgagtatgtgacgcaacggttgtggaccactgcgaataggcaatccacccgagaacatacccgccgctcaatatgagaagcgccgtaaatttcgttctgctgctgacaggctcgtagtccagaacagaaacctggctcgcatttccggttttgatatttcgaaacccgaaaaatacgataaggaaaaacagcacatacagcaaagcattggctaaaaacacgtacgtaaacgagtacgccgcaaccatcccgccgagtgccgagcccacggcgacacctgcgttctgagctacataaatcgcattaaaagctctccgcccgccttctttccataccgctcccgccatggcgtaactggccggaaacacgataccggaaccgaagccgacaatgatgagcagccaaatataaacgggccattggtgaaacagaacgagtccgagaagacttgccaatgtgatcataatgcccagcataatggatttgaatccgccgattttatcaaacaaaaatccgccgcataaattccccgccacactggccccggaattcagcatcagaacaatccccgcaacagtcagcgatttccctaaatgattatgaatatagatcgtattcagcggccacaaaaaagatgcgcccgtcacattgataaacattccgatgattaatatcttcaaagcgcgcggcataccgatccccctctctctataaaaaaccccatgaaaaaacggaaaccgcaagccgcggctccgtatcgatcacgttatcatagcacattcattctatcgccgcggacgtcttttttcaacatcagaatctgaaaaaaataatgccggaatgttgaaaaaattacaaatgattggattcgcaaaaacagcccggcttcatgctcttttcctcagcagccaaaacggaatatacagaatgaagaagctcaatatcaccgccgcttccattgatagaagataccacggccaaggtccgaaaacattcagaagcgaagcggtcttcggttttttcattaaatatagataatttgcattcagcacacgatcaataaaaaagacacacgccccgtacagatttacgatcagcaccgacacccacagcccgcgcgccgacggcctgtacctttctgaagcggccatgaatagacaggtaagaaaaacacagccgtgggagacgaaaaacacgatgtaccgaaaatgcgggaaagaatacgcccctaaatcaggtgttgccatcgcctgtacggcgctgcccaaaccggcaaaatagaggaaggcgaatagctttttgctttttgtcatgaccatcagcatcgccaaatagacggaaaggtcgctcagctgcagcggcagagctgttttcagcgaccaggcatgatgacaaagcagccatatatgatagctgatctgcgacacggcaaggagaatgaatagtacatagcggatcatgcggctctggttgagctttttccggaatacgatcacgcccgcccccagcaacccgatgatcaacaatgtgaaaatgtgttccttggaaaaaagatgaaaggcccctgtttcagatttcaattgaaaatacttctgcataaggctcccccgcgcgaaaaaatgacgtatgtctattcttttaaaaatcgctttcttctattcatacaaaaaaagcctccgcttatgcggaggctcctcaacttgttttacaaggcggattgaatgacctttttataatacagcaccgacagcatgccgaagatggagtacagcagcgtatacagcgccatgacgatgatcatcggcgtccacacttccgttccgaataaaaaccatcctgactgaacggcaaaatagctgtggaacagcccgagaacgagcggaatgccgaaatgatacgcctgcttccggcggatgcctttcagcagatctcccgttgtgaagccgagcttccgcaatatcgtataatcagccttctcatcctcacactcgcccatttgtttaaaataaaggatacagcctgaggtgatcagaaaggttaatcctaaaaacccgacaataaacatgatcagccccatgtttttcttttgcgtgtcagccgtttcaaattgtgaaagcgcaccgtctgaatagtgctgcgcctgaaacagaccatcagctttttggatgtcctcttctcgtttgagtgtaatgccgaaaaaccgatttgattttccctggatggacgggtcgatatctttctcgatccggtcgaatacctgctgcgtgacgataacggtcggcagccctccgcttgtaaatgtatatgacaggaggaagtcgttcttcaagcccttatacgccagcggtattttatccgttttgccgtttatatcaatggaacccgacgttttcaggtcgagaaatcttttcatcatatcattatatccggtaaacacggcttctccgtcagaaagctccgtcccttctgcgtctttctcgcttataatcggcagcgccaggctggacgggtcttgttgaaagcttttcatgtcgccgtttataatgttcttcatattgacaccggcttgaatggtcttgattgtttttactttgtgttcaattccgtttttcttcaataaagcggtaaaagagtcagtctccttttggttatcaaacgcaaagtccgcggctgtattttgctcagccgatttttccgcggagtagtacgagatatagcttaaagacagcaaaccgattgccagcgccgaaagagtcgtaataatcgtcagcaatacggcgtttgacttcatccggaacatgatggatgacaaagacagcacttcactgacattcagatacccgccttttgatttccggatgagatttgccagaaagctgaccgaacctttataaaacagataggttccgataatgaccgagccgagaataaacaccatggccgaaaacagttcattcatgctcgtaaaactgcctccgaataaatccgcggacacggcatagccggcgataatggccgcaataccgacaacgccgatcaacatctgcacccaagaaagccgtcttatgccgctttctgacgatgacgcggttttaaataaagacaaaatgctttgccgtttaataaataagtaattcatcatcataatcagcacgtaaattgccccgaacacaattaacgtctgaacgagcgccttgcttgaaaaaaacagtgagacagaggctttcacaccgactgtatgaaacagcatcatcatacataatttcgagagggaaaagccggcgaaaataccgatccaaatcgatccgaaatacaaaatgaaattttctgcgctgagtatgcggaaaatgtgcattttcgtcatcccgattaatcggaataagccgatttcccggccgcgccgtttaataaaaatggtgttggcatataaaagaaataccgacacgatcgccacaagcagtacagaggcggcccggattgccgccgctccttttatggagcttttcatttcatcaagcgccggatcgtattgcatcgtgacaaacgcgaaataaagggcggcgctgaacaccagcgcaaaaacgtaaagataatagtttttcatattctttttcaggttctggaagatcaaatgatgaatactcatgcctgaaccccgcccaatacactttgcgttttcataatatcctgaaaaaagtccggtctgtcctgaccgcctttattcagctgcgtatacacacggccgtctttaatgaaaaccacacgtccggaatagctggcggcaaccggatcatgcgtcaccatcacaatggtggcgcggcgtttttgattcaggcggctgagtttattcaataaatccgtggcagcctttgaatcgagcgctccggtcggctcatcagcaaaaataatgcccggctcgtgaataacagctcttgcggcagacgtccgctgtttttgtccgccggaaatttcactcggatacttatgtctcaaatcatagatcccaagctcctctgccgtctcggcaaatcgcaggtccgcctctttcttagacattttcgtaatggataacggcaggagtatgttttccttcacggtcagcgtgtccaataaattataatcctgaaaaataaagccgagatgccgttttctgaattcggcaagctgtttttctttcatggatgtaatctccgtctcgttcagtttaatggtgcccgagctcactttatcaatggaggaaagcacattcaaaagggtcgttttccctgatcctgacgggcccataatgctgacgaattcccctttgtgaatctgaagatcaattcctttcagcacctcttgtttattcagcttgtttccgtagcttttttggatattgcctgcttctaaaatcatcacgttatgattctccttttacattggttatctttattttaaaaacagaagccgtttttttcgtttgattaagcgaacaaaagagaaaagcatgtgacacttttgtcacacgctgaacatgctgacggcatcgttctgttttggaaacaccaaggtaaaaatcgtgccgctttccggctcagagcgcacgctgatctggatgagaagcggagccgcggcttttcgagccaaatacaggcccatccccgttgacgcgtgatctcgcctcattcgcgtcgaggtaaatcctttttcaaaaatgcgcggaagatctttgggctcgatgccgatgccgcggtcttcgatatcgacatgcacccggccgttttgttcatagctttttacggtaatgtcatccgcttcactgtatttgacggcattgcttaacagctgcctgatgatgaaggaaagccattttccgtcactgtgaacgtccggtgaatcaagctgaatgtcaaacccgatccctttttgtatgcaccatgattgcaggtttttaatttctttgaaaacgagcggtctgagctgaatgcgctggaatgataaatcattttcaataaaggacaatcgtttctgatgaagctgctggtccaggagatggtgaatccgcagccattcatacagcaaaggggctttcagcggctgttcatcaaggcgctcgatcatgagatgcatcgctgtcagcggtgttttgacctcgtgaatccatgacatcagatcatccttttcatgctctgacgccgcctgaagatcaagtgagctttttcgtaattgctctgtctgcccttcaatgctttcttcaacgatagactcaaacggactgtcaggcgctttaagataagacatgtctaaattggcgtcccactctcttaagcttttataataggcggtctctttacgatagcggaacaagagaaatacaagaaacacaagaagcgacaggtaaacaaaatacagcaccgaaaaaaacggaatagacgcatcaatatatgccgcaaaaaggagcacagcctgctgcaaaagaaacatcgcgatccagctttttctttcgagcagaaatgatttaatcataaagaccgtcttcttcctttgcgatgtatccctgccccaccttggtttcaatcattttcccgatgcctaattgatcgagttttttccgcagccggttgacattcaccgtcagcgtattatcactgacgaaacgctcatcattccataggcttctgatgagttcttcccggctgacgattttatttttctgctcagccagcagttttaagatcagcatttcgtttttggtcagttcgaccgaaccgtttttacagctgaccgtgttggtttctgtgtcaatgaccgccccgcaccatcttttcatcagcgccggttctgtgccgtattggtgcacacggcggaacaccgcctgtattttcgcgattaacacatcaaagtgaaaaggcttctgaataaaatcatctgccccgagctgcatcgacatgaccatatccgcgggatgatcgcgcgaggacaaaaagagaatcggcacgtttgattgggagcgtatcattctgcaccaatgaaagccgtcaaatttcggcagctgtacatcaatgatcaccaaatcaggcttaatttcagtaaactcccggatgacccggctgaaatcctttattccgtgcaccgcaaatgaccagcccgttaatctctccttcatctcgtgaaacaaagtgttatcatcttctattaacaaaatgtgaaacatggtatccgcccttttctgatagatagaggaaaaaccggctgatgtccagccggcttttttcctttacagttctcttcttaatgcggtcagaacgttggtttttgtcgctttgcgggccggattcataccggaaatcaccgcgacccccgcacaaatgacaactgcgatcacaacgaggctgagcgggatgtaggagaaggtataatgaagatcttcagctccggtatttccccctaccgctttcaaaataaccggcacagccagattgacggcaaaactcactccgtaagaaatgataatcccgatgacagaacctaatatcccgatataggcgctttccatcaggaacattctgcggatgatggacgggcttgcgccgatcgctttcataatcccgatttcctgcgttcgttccgtcaccgccatcgtcatcgtattgaaaataccgatggctgaaatcacgacggcgataaagccgacaaagatcagaccgattttaaagacgaggaaaaaggtgttgacgcccttcagctcggttgtgacagatctgacataaaagccgtcatccgtgaggtcatgggtaagctgatcgacatgatcgaatttgtccgcatacacattgatgcttttttccgcatttccattcttcagatccaagaatgtcgagaagtctttcttgaattgatcactcacaaaaatatttgtatcctccatccaatcttgggacggtttttttgtaattccgactactttgaagtcgtacgttttcgttttttcaacgtctccgtctttgtttgttttggagatgctcagctgtatcgttttattaagcaggtctttcgtatagccttttggttttttcacctccgacatgtcgccttggtgatcctttaactctttgtcgtaagcgtcagcctcttttttcgtcaataggttcttcgcaaaatcatagccgaccacgatttcattctctgtacgggcgactcttccctgatcaagctccatattggctttgacttcatctttcatgtttgtcagcacaatggctgaatcttcatttgttcggtttcccaatgacgctttgttcggttcatacacttgtgttctctcaacgacagacttgacatttttatacttttccaagtctgatttcttcacggcttttccgttctcttggccgagcacattgatttccgtaacaatctgctggctcatcgtaatgtctgtaatcgttttttggatgccgaatccgacggaagccagcaccactaaaaacgcgcacgccattgtcgtcgccagcaccgtcatgaaaacacgcagccggtttttcttcatatttcttctgataaagtgaatctgatccttaaatctcaacagtaacgcccccttttaatacaccgtcatgcagctggaattttgaatgcgcgatcgaagcgacttcatcgtcatgcgtaatgatgacaaatgtaatcccgcgctcccggttcagctgctgaattaatgcaagcacctcaagttccgtttctgaatcgaggcttcccgtcggctcatcggctaaaataattgacggatttaaaatgagggctcttgcgatactgacacgctgctgctggccgcctgacagctcattcggataatgattcgcatgattttcaagtccgacccgtttcagcatatccgcgactttctgcttgcgttcagacggtttgacaccttttaaggcaagcggcatttcaacattttcataggttgtcagactcgggatgagctgaaagctttgaaaaataaagccgaaatgcccgaggcggaactgcgcccactctttttcattgaaacccgtcacatcagtgccgttaatgacgatacggccctttgtcggcgctatgtatcccgaaattaaattcagaagcgttgattttccggaaccgctccgcccgacgatacaggcaatttcccctttttcaacggtcaaagagacatccttcagtaccggaacctcactctctctgcctttcctgccgattttaaatgaatgatcgatatgctgtacctctatcacgtacaccactcccccttatatctgtttcgtttttttatagatgaagtaataactgatgaaaaacccgataatcgcaccgatgagcatgccgaatatgtaaccggtatacgaaccgttataagcatatccgcatacccccgcacttcccagcatactgagcgacatgacgagcacttgaatgatgcgttcaatgtgtttgctcaggataaaatgtccgcttcgttcattcggcattttcaggaaattcacatagccgaatagatagaaacaaaatcccattaatgcggagatgaacaatgcgtgtttcatgtaatacatccatgatgtatggatgtaagcggcaggcatgaaatagatcagaaatccgctccaagggaaatcaatatccggcacagcctgcctgccaaaaaggaactcggcgtttaacagataaatcgtcataaccacgatcggaaagacggaaaccgtgaacgctgtgatcagctgcgccgctaaattgcccgttatcgtgccggcagctgtcactaatgcgtaaatcatcaagctgatgaccagcatccctgcgctgaatgattgaaaatgatggacagcgtcaggtttaagcgctaggaacaatatgtcggatactccgtaagaaacaaactgcgagccggctaacacggctgctcccaagaaaaacttcgtatgaaatatccggcttctcgaatacggaagactcagtgtaaacatcctttcagcccggcctgctcttatcagaaaaagccccataacaaccggcggaatgaaatgaagcccaatcaaattccgataattgctgtaatcgatgctgaatgtacaaactgaccccgggtacagctgaagtgcacgtaaacaatccttatagtgaaaatactcatttataattgccaaagggcctaagatagataagaaccccgctgtaagcagcagcagcgtctgccgctgcttacattctttataaagcaaaccgctaatcggcaccttgccttcctccaaactgctcattttcaaacggatctacatatgctttgactgtctgtaaaccgtaaaataactgatgaaaaacccgataaccgcgccgaagataatgccggctaaatagccgaacatcgtgtctgtgaccccatatccgaaaacgccgaaacccataacggcaaacgcaatcaccaagatctgcaccggccggtccaattttctccaaagaaagaatctgccgttccgttcattcggatgtttcagaaagctgacgtaaccgatcagataaaagacaaggctcatcacaatcggaatgattaaaatcaaatctctttctctgatccagtcgttaaacacatatccaataggggttataaatataaaaagacgggattcgatataactgctgataaaagaaaattgatctccgacactaaaatcgaaaacgacctccaaattcgcggccggcagaccgatgagtaaaaagggcagaaccgttactgtaaacgccgttaacagctgggcgaatatatgtcccgttattgctccggatgccattaacaaggcgtaagccataaagctgatgacaatcattccgattgaaaaatgatcaaaatcgtacgtatggctcggtttcaacaaagatatcagcaatgacgccgctccatagcctatcgcctgaggagcaacaatgactgccccgccgagccagaatttcgtctgaaagatttggcctctgctgtaaggcatgcttaacaaagcatccatcgttccctttgtccgttccaagcctaataagaagacagcaatgatgacactcacaacccagctgaaggaaagaggcgacccattcgtataattgacaacgaattcacaatcttgaagagctgggttattcaaacattcttgatatgttgagtagttgttataaaccataaaagggtttgccgccattaaaagaatgccgctgcataaaaacaaccactgattttttttccattctgtgtacaacaatccccgcggtatcattccggtcctcctctcttacacatgcttcgtttttttataaatcacaaaataactgaccaaaaatccgatcgctcctccgaccagcatcccggccacataccctgtcatcgtatgtcccgtcgagtaccccgccaggccaaaaccgagaacggcgatgatgatcaccacaatctgaatgggccggtcaagctgtctccaaagaaaaaaacggccgttccgttccaccggctgcctgacatagcaaaagtacccgatggcataaaatacaatgctcatcactgccggaatgattaatatatacttgctggcagatacccagtccgtattaacatacatgatcggaatcagatattgaaacgaatcgtttaggtaagcattgactgatggcatcagctcatgcatgccgaccctgaagataacttccgcatttgtcagcggcaacgtaataatcaggtaaggcgctatcgacacggcaaacgccgttaacagctgggcgaacgtattccccgttaagcagcctgcgctcgcgaccaatgtaaaagccaaaacactcacaataatctctccgacgctgtaatggtggaagaaatatacgcgctcaggctttaacagaagaatgagcagctcagccagcccgtagccgatcacctgagcgccggtaatgaccgccgctccgagccaaaatttagtgtgaaacacctgagcgcgggaataaggcagactgaaaagcgcatcaatcgttcctttcgtacgttccagtccgaataagcaaaccgccaaaatcacagcgggcgcccagtttaagttcagcattccgctatccaaagaattcacataaaacttacaatatgcttcgtgggtgtccagacagccttgataaaccagataggtatttaacacttcaaatggattgaccgccgctaaaaaaatgccgaccatcacaagaacagttcgattctgcacccattccctgtacagcaatcccctgtctaccatctccggtcccctccaaacttcgcgatgaaaacttcttctaagttcacaggaagttcgttccatactttcggctgcagctcttgcagaaagttctttttcttctcatcgttcttttgaatcagcaccgtataaaacacaccggcatggtcgagaatcggtatattttgttctctgatcttcaaggcgacgtcctcttcaaatgccatttggattttcatgtactcttccttcatatcatccaagtccatcacattcgtcagctgatttccttccaaaaacccgatccggttgcacattcgctcaatatcttctaaacggtgtgaggtaatcagaatgctcgtttcccgttcagctacttcatccaccataagctgcagcacgtcatgacgcgttacggcgtcaattccgtccgtcggttcatccaaaaggataagagccgggcgtgaagcaaaggcaaggacgagcgcaagctgttttttcaggcctgtggataattcacggtatttcttcgtttccggaatgccgtacctgttcatcagctcattggcgtaagtcacatcaaaattcggatagattctgcttacaatcgcaacaagctgtttatatgtatacttgtcataaaaaggattttcaacaggcatataaataatgttctgtttgactttcggatgacgctttatttccacctgattaaataaaaccgtcccttgatccggaagcagaatctgctgaatgagccggagcagtgttgttttccctgatccgttccgcccgagcagcccgaaaatttccccttttccgatggtgagcgaaatatccttgagcacttctttaccgtctatcgtttttgagagattccgcaattcaatcatgatcctttcctcctttcacatcagcgctgatttcctttatccattcctgcagcttctccagctcaactcccgcgtaatgggcatcgatgatgagctgtttcaattgctcttttatcatcgtcatcttcccttcaaccaatgtcgtttttgcattctccgatatatacgttcctcttcccctcagcgtttcaatgacaccatcgcgttcgagctccttgtacgctttgctgactgtgttcggattggcgataatgatcgttgccaattccctgacagaaggaagtttatcccccggcttcatgatcccttttaaacaaagctctttcaattgctgtatgatctgctcataaatcggagttgagcttctcggatcgatttgaatcatttacttcccttctttcttttacgagctgctctctttctttaaatgttctgccattgaaaaccgatgacgacaagaacgacaaacagactgctggccaaaaccgaagcggcgataataagaggcacatcttgttttacggatcttttgtttttcatgaaagttccccttccctatgcttaacatttatatgtcgattcatttttcgagtgttttatgtgtattacatcaagtagtacacgtaatacaataaacacactcaggcctattgtcaattctttttttaaaaaaatacaaaaaaacccgccgggattccggcaggtttgctgaaccatttgaaacggcgcggtcagtaatcaaaattacgctgcaaaatcatgttgttttgcaaggtctgcagctgcaatctcattcggtaaagctgctctctttgctgatcattcgcagataatgacagcttgtttaattcattcaccgcgttttcaagcatcatttgcgcttcactgtactcattatcattataatgctcttgttttgaagcggtcataaattgctcattcgcaaattcatatgcctgttcgcttctttggagatgttcatctactgattgtcttgttgccattaaacagtcctcctattgataatgtcatatcaatagtatttcttattccaaattaattctcacaagaaatatcaggtaattcattcacaagacagagatggcataaaatacgattaaatgtaaaacttaatcaagacagaatgaagtctttataaaaatccttcattttagaacgataacttaattcttcttttattaaaaacatcataatttttccacatcacccacaagatcttcggttcgctttaaattgttcaccattaaattatcttttttgtgtaaaacacccgggattcatcaaattttttagatctgtttttattagctttaattatcatcccgaaactaacaccaactataaaacttactcatccccatctaagactggaacagctttaaattttttcaacaaaccgttcaaaagtgaatcgaattttgaagaattaagataatagtatgttttattttgatttctcgtactctcaactaaaccttgcaatgtcaaaattctcatatgatgtgaaatcgttgcgttggttaaatttagctgttcagcaatctcattagcatacatttttttatgactaagtaagattaatatcttgaacttacttttatccgataaaagcttcaaaaaatcaatgatatgattaatctctgctttctctaatgtattttcaaatattttatcaactttataacccagtccaacataaatgttatcttcacttttcgtaatagttgcagtgcaaggtaaaagtgttggatatatattaatataattacaagataagtattccttaccttttaacgtactgattatcttttttggaaaatctatatttatgttttttaattgattcatccactcatctctgaatttaattaaattataaatcgcctcgttaagataaccattcaccaacattaatttattgcaaaattgatctacataagttttaggagatttcattaccttaaatatgatccacttgtattcgggctttatatttagattattaagtagctcaaataaactttccctatcatttaaatactgttgggtagatgtttcggttttaagatctccttgtaaataaattagagactctaaaatattttttcttatctcttcttctgtaactgcagacaaataatcaataatttcaaaaaaatctttcgtgtaaatttgtggtattttaaaaaatgttgtggctaaacaaaaaatatttgcattcctaacatctttgtagtcgcaaaagctgccaaaataaaaatttaaaaactcactatctaactcttttattcttttaagatcatctaataatacaaaatattcattatctaaattcaaacccaatttggttgtataatctttgaagaattcctcgtgttttaagaatagaatagaggatatcttgtcaaagaattctgaaacactgtcatttattattaaccgcactttttcacaccccataaagtctttttccacaaaggaaaacgttgtactatcttcatgccagacattttacatttttaatattatcaatcaaaaggaaactttcaaagaatattcatttctaattagcacttacctgactgagcattatcatgagcagtcctagatttattagacttgcttcacctcatgctaagtattctcctcatgtcatactcttcagaaatccttaatcatctcagctagtttacaggtccatttaagctcttattgagttatttcaagttacaaaattgttgaattataaaaatatgatttcgagataagtggatgaaaaaacaatttatgaataatattgacacctcttaagattgcatttatcatgtttttagatatatatcgaattttaatttagattaatatctgatggaggttgtagttttgaatttcaaaaaattaattatgttatctgcattattattaggtacattcatttcggtaatggacaccactatagtaaatattgcattacctaagatgctggattacttttcgagcaacctttctcaagtagcttgggtggctacaggttatactttagcttttgcagttttattagtaggtgcatcaaagctggcagaccattttggaagaaaaaaagcttttatgtttggattagcactttttattttgacatcagttattgcctgtttgagcacttcaattgaaatgcttatcacaattagagtgattcagggattatctgctgctttcattgtgccagttacaatgcctattgctttggccatcgttcctcaaaataaaaaaggattgatcattggaatctgggggctttctcaggattagcagctactttaggacctgtacttggaggattattaactgaaaattttaattggcaagctatcttcttcataaatattcctttaggcctgatttctctttttttagcagcattttttattactgagagttatgatgaaacagtgagtaaaaaaattgattacatggggattcttattttatccggagctctcttctgtttaacctttggctttgcaaaagtatctgatttaggctggtcatcaccattaattatctctctttttgtaatctctgtattattattctgtttgtttttctttattgaatctaaaattaaaaacccgatgattcccttatccatgctgaagatacgtacgtttagtttcagttctttcaccctctttatgcagggccttggattaacaagcggtacccttattattactttactcctcacgaatttaatgggaaaaactgaattagaagcggggttaattgtttctacattagctctatcatctatgtttacctctgtactttctggaaagctatctgataaactcgggggcatttggctttcgggtctaggtatgctcggtttaacaatcacaacatatttatatggatacatacgatacgacagttctgtaacaacggtagttattctgttatgtttgaccggcttagctttagggcttgtgataggaccggcaatgagttcagggatacggcttattcctcctgagaaagtaggtattgcctcaggtattcttaatatgatgcggacagttggacaagcgctaggcattgccatacttacatctgtgcttacaatgaatataaatgatcacacagcttctgcaaaaaaagaagccataacaattgtggaaaacaatcaggtttttgataaaaatgcaaaaaacgagataataactcacttaaagcattcagacagtaaaggtttcgatcgaagaaaaagtattgctgaattaaacaaaaaagaggaagaaattctttctataaccccggatccatataaagaaaaggtacaaaaaagtttcaatactcaaaagaaggaagttatcgctatccagaaaaaaatttcaaatttatataatgaaaaaataagtgacagttttaataatacattcaaagtaggcagtgtaattcttattttaggaattatttttgcattgttcagtgatatttctccaaaacgattaaaacaacaacagaaaaaccaggtagatattacgccttgaccgttccataattgtttcattgttccgccccatcattcatgctacaattttaggatgcatctgatgtgagggaggctttttgaacattgaacgagaataacccttttccttattcaaatacggaaaaacggtaccatacattaaattatcatctgcgggagcatttcgggcataaagtgtttaaagtcgcgcttgacggcggttttgactgcccgaatcgggacggcacggttgcacacggcggctgcacattctgcagcgcggcgggctccggcgattttgccggcaaccgggccgatgacttactcacgcaatttcacgatatcaaaaaccgtatgcacgaaaagtggaaagacggtaaatatatcgcatatttccaggcgttcacgaatacgcatgccccggtagaggagctgcgtgaaaaatttgaatccgtcctcaagcttgacggcgttgtcggcatgtctatcgcgacccgtccggactgcctgccggacgatgtcgtggaatatttggcagaactgaatgagcggacctatttgtgggttgaactcgggctgcagaccgtgcatgaacggaccgcactcctgatcaaccgcgcccatgattttgactgctatgttgagggtgtcaataaactgagaaaacacggcatccgcgtttgttcccatatcattaacgggcttccgcttgaaaacagggacatgatgatggagacggccaaagccgtcgctgatttggatgtgcaaggcattaaaattcacctgcttcacttattaaaaggcacaccgatggtgaagcaatatgaaaaaggaaagctggagttcctttctcaagaagaatatgtaagtcttgtatgtgatcagctcgaaatcattcccccggaaatgatcgttcaccgcattacgggagacgggccaatcgaattaatggtcgggccgatgtggagcgtcaataagtgggaagtactgggcgccattcaaaaagagctggaaacacggggaagctatcaaggaaagctcttcagaaagaccggggaggagaccgccctatgaccttgatgcacatcctccctttcagtaaagaattgctgaagtccgccgcacaggaaggtgatatcacggttgacgcgacgatgggcaacggacatgatacatattttctggccggccttgtcggtgagacaggacatgtccatgcctttgatattcaagcggacgcactcgctaaaacgaaggagcggctcggtgccgacttcggcccgcgcgtcacgcttcaccataaaagccatgatcaaataaaggcatcgctgcctgaagatgcgcacggtcgtgtggcttgcgccgtctttaatctcggctatctgccaggcggcgataaaagcattacgacaaacggtcactcaaccatttccgcgatcgaacagctccttgaactgctgaaggagaacgggctgatcgttctcgttgtgtaccacgggcatcctgaaggcaagacggaaaaaagtgcattactggaatactgcagcaatcttgatcaggaaaaagcccgcgtgctgagctacggctttctcaaccagcaaaacgacccgccgtttattatagcgattgaaaagaaatctgccggcaaataaagaatcggcctgtcataagcgggccgattctttttgtatttacttttcaagaaaaatcaattactatgaaataatggaaaaaagttcatcttttaagtgtaacatctgggaggagcggcaatttgaatattcttcgcatcatattttcaagtgttccctatgtgatgtttgtcatcattttatcaagacatttaggatttgagttcgcgaaaacctattactggtggtttgctgcattttttgtcatcgggctgatcggcaaattcgcaatgcaccttgcggcaaaaaagaaaccgttaaaaaaagagacagcgtaaaatgcgcatgtctctttttatttactgttttgcagcacgctgcgtgtataagcgggattgttcgtaaagacaccatctgctttttgtttcagcataataggcgtcagcgtatgctcgtcttccttatcaaaaaacacgtgcactttcatcttattgtgatgaatgcgcttcacgactgcttcatttgccaatttggcgttgatcccgactgtatcagcatacgttctgatggtttgcagctgcttatcatttatctcctcagcctcgttatcttttaataatcgaacaagaggaacttttttattcatagaacgaactttctttaagctcttcccgctaaaagactcaatgactgctttatggccggaaatcagcttatgtttttgtaatatgtcaatcagtttcttttccatcaccaggctgccgttgctttctcttgtctcaatatagtaattggcagtttgtccgaatttctgtatgatttcttctaatgttaaaatcttttctccttttcccgcattcagtttcttaatctgagccaaagacagatcatctgtcatccctttaccatctgttgtccggtctaccgttttatcgtgaattgcaatcagacggccgtccttcgtctcccgtaagtctatctcaatataatctgctttgtctttaatcgcacgtgcataagacaaagcggtatgttccggctcaatcgcagaagagcccctgtgcgctatcaagacaggatgatagccggcggaagcatgggtgacggagcagcctccggaaatggaaagtaatgctatgaccgctaaatactttaattttttcataaaattaaagtatcatattctgcaggcgcacacaatgtttcattcttcacatcataaataaaaaactgcgccgtcatgatgtacacgagaggcgcagttcacccattacgaacttttcgtccaagccatcttctgaaatttgcggtaggctcttccgttgatataaaagaaaaatgacgtttttccgcttgccctgatcagctttcgcgcgaggcggcccatttctttttggccggcgactttgtcatcggataaatagacgccgagcagccccctgttgatcagccggtgaaaattttcatgcggaatgccttgcaaatgttcatccgctttttcaataaaatgctgcagtctctgcatcatttcttcatgagactgataatacgtacagaaattcagatcgccttcaagcagatcttcttcctggtcaattaaataatcaagcagtatatgcaggccttgtatgtacggaaaataactgctgcggattttctcagcggtatgttcgttaaaatcaggctggaatgagtaagcaacgagacagaaaatgcctaacgtcgatccggcgcaggccgagaattcaaaccactccatttccggaagctgcgacctgtactgctcaaaccaggctttaagcctcggaacccgttcatgctcaacgacatgcttatgaacctgaagatcgcaataataatcacacagttcaagcaaataaggtttaatgataccgtaatgttctattgacccgagcacccgctggcatgttctgaccagttcatgaagataaccgccgtcatcccgctcctctctgtactgatagtacggccgcacctcggcaccgaccgtcagcgcgtcacgcatggaaagatgaagcatgcggaagtcctccggatcaagcgaggtgctgcggtcgcacagattgtccagataatcactgattgtctgatacgcgatgataaattgcacgcatttctgtttctgctctcccgaaagcagggctaaaatgccgcctccttcacaatgaaacgacttatcgcggatacttgcggccgcctgctgccgcagttcggtatttttaatggaatctgatttttcccgccacatgttcaattcctgatgaacgagcggaaaaatttcccgatacacttttgccataaggttaaaaggatgttccggtactgtcaacatatgcaccccagcgaattcaaatatactgatctgtaaaggcttttgccgccttaaacacagtttctctttcaggttcattaaatatttcatgataaagcccttcccattcccggtacgatttattatgggaagccacaccggaaaaccatttgcggactttcattttatcgacgattttgtcatcaccgccctgcataagcaaaagcggcacctttaaaaacgcatcagtcggcaccatagcggcatcaatggtttttaaaagctctctgtaccatcttacggataccttcgtgacatataaagaatcgttttgatccgcttcaatcatatccgcattcctcgttgccatatcaggtgataagccggaatccactctgagggacggagcgaggacgttcagtcctttagacgcaaaatcaaggactttattgacttttatttgcagacccagacaaggtgatgataaaatgagtgccgtaatgcggggatttctctgctgcttaaaccattctatcgcaatcagtccgcccatgctgtggcccaaaaggaaaacgggcgcttcaagcgttctcgctttatcaatccatatatctacttcatcaatgtattcttggaaagagcgaatatgccctcgggcgcgggtcgacgttccctgaccgggcaaatcgcccatcaccacgttatatccggaagatctccacatttcaacgagccatttataacgcccgtggtattcgctcgccccgtggataatgacaatggtaccgacgggcctgtctgctttccaagtccacatgcagttcacctcttacataaatttagagaaagaaggatgagacatgataatctacccttataaacaatttacgcctgacgtacatcctgaagcgttcattgcggataacgccgtcataacgggcgacgtcgtgatcggagaacaatcgagcatttggttctcggcagtcatccgggggatgttgcgccgacaaggatcggaaaaagagtcagcatacaagacttgagctgtctgcatcaaagcccgaaccgcccgcttcttattgaagatgacgtcacgatcggccatcaggttacactgcacagcgcaatcatcagaaagaatgctttaatcggtatgggctccgtcattcttgacggggcggaaatcggagaaggcgcgtttatcggcgccggaagtctcgttcctccgggcaaaaccattcctcccggctgtcttgcgttcggccggcccgcaaaggttatccgccggctgacagaagaagacatacgggacatggaaagaatcagaacggaatatgttgaaaaaggccgatactataaaacaatgcaagagaaataaaaaagatcagctttgttttactactgtaccatttttcaaaatattatttaagtaaaaaccatttgcattctcccgattgtcaggaaacagaagcaaaatgttcaggaatttgttttattcttcccccttttacccgatcctatgaaaaaagagcccatttcagcgggctcttttttacgctttttcggcgaatgtctgtccgttttccagatctatgtcttttcttttatggaatcctttgccgtaataggcggctaataatatgccgaaccagacaggaccgatgatgacggccaccctggtctctgcatcaaaagccatcagcacaacgacaaaagccagaaatgccagcgagatatatgaggaaaaggggtataaaggcattttatatttgagttttttccgttcttccggctgtaagcttttacggtatttcatttgggaaagcaaaataatcgaccatgtccaaattgctccgaacgtcgcaatgctcgtcacccacgtaaacactttcgccggcaccacgtagttcagcaaaacgccgatgcataacgcacccgctgaaaccaataccgcttttcccggcacaccgccttttgtgaccgtaccgtatgctttaggcgcttcattttgctccgccagattgaacagcatacgccccgtgctgaagatcccgctgttgcaggaagaaagagccgccgtcaatacgacaaaattaatgattccggctgcagcgggtattccgattttttcaaatgtcaaaacaaacgggcttccgcctgaaccgatttcctgccacggataaattgacataatgacaaacaaagctccgacgtaaaaaatgagaatgcgccaaaaaacagtatctatggcccgcgccagtgatttttccggatttttgacctcaccggctgtgacaccgatcagctcaatcccgagataagcaaacatgaccatctgaagcgacagcagcacccctttaatcccattcgggaaaaagccgccgtggctccataaattgctgattccgagcgcaacgcctccgtttccgagaccgaatacgatcatcaccagaccgatcgcgatcattgacagaatcgccaagactttaatgagcgcaaaccagaattcaagctcaccgtacgctttgaccgccagaaagttgacagccgtcataatgacgagtgcacaaagcgcccagatccatgacggcacgtcagggaaccagtagcccatataaatgccgaccgcggtgatttccgccatgcaggtaacgacccataaaaaccaataattccagcctgttaaaaacccggcaagcgggccgatataatctctggcataccggctgaatgaaccggctacaggcttttgaatcgccatttcccccaatgcccgcataataaaaaacataatcagtccgctgcaggcgtaagcggctaaaatccccggcccggcaagctttatggcagaagcagacccgagaaacagcccgactccaatcgcggcgcccaacgacataagcgagatatgccgctcttccaagccgcggtgaagcgttttttctttgttttgcataactctccctccccctgattttgacaaagaaacaacaaaccgagacgaaatagccagaaaactttttccggaatctacccgattagtcctattataacctttttctgaatattgcgtaatactttgtcgaaaacagagcggaatagacggtttacaaaaaacaatagaaaaaaggctttcgataactcgaaagccttttggattaaacgaaaatgacttctttcggctgatgattcagctcttccggcaccagtcttttttcgacattgatgctgtgccagatcatgaagatcagcacggtccagattttgcggctgttgtccgctctgtcggcacaatgatcttccagaagctgaaggacataatccttttcaatataagcgtctgtttcactttcgcgaatgatgttgcgaacccattcgttcatttcatttttcagccagtggcggatcggcacagggaagccgagttttttgcggttaagcacatgatcaggcactaccccttcagcagctttgcgcagaaggtatttcgtcgtgccgtttttcgttttcaattcatccggaatttttgaagctacgtcaaacacgactttatcaaggaacggcacgcgcagttccaatgagttggccatcgtcattttgtcagcctttaacaggatgtcgccgcgcatccacgtatggatgtcaacatactgcattttatttatgtcgctgtatgaacggctttccgtaaagtacggcttcgtgacatcacggtatgaaagctctggattgtaatgtttgagcagctgttttttcacgggctcttcaaaaatcttcgcattaccgatatagcgctcctcaagcggtgtgcagccgcggactaagaggcttttccctctcattccttcaggcatgacggacgccacatgaagaagcatttttttcagaccggacggaatgcgttcaaacggtttaagcgaaagcggttcgcggtaaatattgtacccgccgaacagctcgtccgcgccttccccggataacgcgaccgttacatgctttttcgcttctttcgcgacaaagtacaaaggaatcgccgccggatctgcaagcgggtcatcaaagtgccagacgattttcggaagctcgttcatatactcctcaggagaaatgactttgctgatattttcaataccaagcgcggcagccgtttccttcgctacgtcaacctcactaaagccctgctgctcaaaaccgacggaaaatgttttaaggctcgggtgaaattctttcgcaactgaaacgataaaagaagagtcgataccgccggatagaaacgaaccgacaggaacgtcacttctcatgtgaactttgacagagtcaaagattgcgtctctgacttctttcaccaatttatcttcatcagactgaacaggcttgaagttcgctttgaaatatgttttaaacgcgatgtcgccttccgggcggatcgtaaactggctgcccggctcgacttttttcacttcagcgtcaagcgtgctcggttcaggaacgaattggaaagacatatattgctgtaaagaagctgtatcaagatcaataccgttttgagcggccattaaactctttctttcagatgcaaaatatactttgtccccgatggttgtgtaatacagcggtttaattccgaacgggtctctcgcgccgtacatgacgcggtcagctttgttccagattaaaaacgcaaacattccgcgaagctttgaagcggcttcttctttataatgacggtatgtcgcaaggagcacttcggtatcggaatctgtattgaaagtgtagcctttcgcttcaagctcttctctcaattcaatgtagttatagatttcgccgttaaaaatgatccaatatttttcgtcttcatatgataaaggctgtccgccgttttctacgtcaataatactgagccgtctgaagccgaatccgacgtgctcgtcatgataatacccatcgctgtcaggaccgcggtgaacgatcatttggttcatttgtttgattagctcttcttgatctgcggtttgagttaatggatgcttattaaaaacaccgacaaatccacacatagtatagcctccataagtgtaattttctaattggaccccctttttatagacgctttgttacgccattggtttcacgctatgtaaaaaataagcatggcagcatctacaaaaagggaaagccgcttaagtaagcggctataaaattattctcctagtgcttctttgcgaagcgcatccgccttgtcagtacgctcccaaggaagatccacatcatgacgtccgaagtggccgtaagcagctgtctgcttatagatcgggcggcgcagatcaagcattttaataatgccggcaggtctcaggtcgaagttattccgtacgacttcgatcagtttttcttcagaagcttttcctgtatcaaatgtattgatggaaatagaaacaggctgtgccacgccgattgcgtatgcaagctgcacttcacaagaatcagcaagacctgctgccacgatgtttttcgctacgtatctcgcagcgtatgccgctgaacggtctaccttcgtcgcatccttaccggagaatgcgccgccgccgtgacgtgcatatccgccgtatgtgtcaacgatgattttacggcccgtaagacccgcatcaccttgaggcccgccgattacgaaacgtcccgtagggttgatgaagtattttgtttcttcatcgatcagttcctcaggcacgacagggttaatgacatgctctttcagattgcgctgaatctgctcaagcgtaatttccgggtggtgctgagttgaaataacgatcgcgtcgatgcggaccggcttgttgttttcatcatattcaacggtaacttgcgttttgccgtcagggcgaaggtacggaagaatgtcttctttgcggacttcgctcaaacggcgggctagtttatgcgccaaagagatcggaagcggcataagctctttcgtttcgttacacgcataaccaaacatcaggccttggtctcccgctccgattgcttcgatttcagcatcgctcattgtgccttcacgcgcttcaagtgcctgatcgacacccattgcgatatccgcagactgttcatcaattgatgttaaaacagcgcaagtctccgcatcaaatccgtatttggcgcgtgtgtagccgatttctttaatcgtttcacggactgttttcggaatgtcaacgtatgttgacgtagtaatctctccgcttaccagcacaagtcctgtcgttacagatgtttcgcaggccacgcgcgcgttcgggtcattttttaaaatctcatctaagatactgtcagaaatttggtcacagattttgtccggatgaccctcagtaacagattcagatgtaaatagtcgacggtttttactcattcacttttcctcctgaaaaaagatcttttgcaagaccttctcatatgatacggaactcgctccctcttaatacaatgtcatactatatcagagaatgttaattggcatattttatgaaataaaaaaaccttttccactcgaggaaagggtttggtctgtgtgcctttcactcttatcgctcaaggaaaatattaaaccttgcatcaggttagcaccttggtttcccacagtgttttcacctgcttttttacagagaaaccggttgctgggcttcatcgggcctgtccctccgccagctcgggataagagtatccgctcaatgaaatatcttatcgtaaaagggcggaaagtgtcaatatgaattaaagcgattgcgcgcctttatttcgggaagcaatggaaaaacacaaacaaaaaaccgtaaatagtatagactattttcagatatatgttatactaattccacattcagcgaaatacaaataaaccggcaaaggaaggtttttatgaaattagttgatttaaccgcagatcttcaagcattacttgcaagtccgaatgtgcatcataatttatcggctccaaaacttaccgaaaaagtgatcagccgaaatgaaggaacgctgacatcaacgggcgccgtacgcgccactaccggcgcatatacaggccggtcacctaaagataaatttatcgtccgtgaacaaagcacagaaaatcaaattgattggggcgcggtgaatcagcccatttctgaagaggcgtttgaaaagctgtacgccaaagtcgtcagctacttaaaacagcgggatgaactgtttgtgtttgaaggattcgcgggagcggatgaaaaatacagactgccgattacggtcgtaaatgaatttgcgtggcacaatttattcgcgcgccagctgtttatcagaccggaaacggatgaaagagacccgcaagcgcagcctttcaccattctctcagctccgcattttaaagcagacccggagacggacggcacgcattcggaaacatttatcattgtctctttcgaaaagcgcgtcattttaatcgggggcaccgaatacgccggagaaatgaaaaaatcaatattctccattatgaacttcctgcttccgcagcaggatatactgccgatgcactgctcagccaacgtcggtgaaaaaggcgatgtcgccctgtttttcggcctttccggcacagggaaaacgacgctttcagccgatgcggaccgcaaactgatcggagatgacgagcacggctggtcagattccggcgttttcaacattgaaggcggatgttacgctaaatgtatcaatctgagcgaggaaaaagaaccgcagatttttcgtgcgatccgcttcgggtctgttcttgagaatgtcgtgcttgatgaaaaaacgggtgaagcggattacgacaattccttctacacggaaaacacaagagccgcatatccgattgagatgatcggcaatatcgtgcagccgagcattgccggccatccgcaggcgatcgtctttctaacggcggacgcattcggcgtgcttcctccgatcagcaaactgacgaaggaacaggcgatgtatcacttcttaagcggatacaccagtaaactcgcgggaaccgaacgcggcgtgacatctccgcaaacgactttctcgacgtgcttcggttcaccgttccttccgcttccggcgcatgtatatgccgaaatgctcgggcgtaaaatcgacgaacacggcgttcaagtcttcctggtcaacacaggctggaccggcggagggtacggagtcggagaacggatgaaactttcgtatacaagagcgatggtcaaggccgctattgacggcagactgaaccagactgacatgacggcagacagcattttcggcctgcacagtcccgttcatgttccgggcgtgccggatgaagttcttcagcctgaaaacacatggagcgataaacaagcatacaacgaaaaagcgctgtttttagccaatgagtttaaagaaaactttaaaaagttttcccatgcagactcgattgccaaaaccggcggacctctcgtgtaatcaaaaaagccaagggcgtttatgccctcggcttttgttttttcagtttgtcgaatgaagcgaagtgagtctgtatgtaatgcttgtccggccgttcgcccattcgagcttctggacctcgccggtgccggatttctcgccggttttcgttttgcgcacgtccatcggaatatcaagaggatagacgcggtagccctctttctccaataaaaagatattttcctctatccgtttttcattgccttttgtcacaatcatggtattaaattcaacaggcattcccaaaatgaaaatcccctttcattctcttattctttattatcatatcataaatcaggcatcttaccgtgtcttcatccattccgccagccgccggacaatgcgtctgttttcctgcggcggaaaataatgcgtaaaaccgctgtaataccaagtttccaccggtttccccgcctctttcagcttgtcctcgatcatccgggcgtgttcgatcgaaacattttcatcattctctccatggatgagcagcacaggggcctgaatgcggtctgctttttcaaacggcgaacgccatctgtattcatccggcacctttttcggcgtgccgccgatcacccgcttcatcatccgccgcatatccttccgctcttcataagtcagcaccatatcgctcacaccgccccatgaaacgagtgaagccgcttgatgccccatttcaatcgcggtcaaaagccccatgattccgccccgggaaaaaccgaaaatatgcacccgcccttccctgacgttcggatgctcccgaagcaggcggaaagcggaaaacgcgtcctctctgtcctctcccgcaaaatcttcatttccctcgccgccctggttgcctctgtaataaggcgcaaacacgacaaagccttgggaagcgaattgaacgattctcccggggcgtaccatgccgacattttttatgccgccgcgcaaatataaaaaaccgtcatatgttcccggcgccgcaggctcggcaaggagcccctttaccttcagcccttctgactcatagcataccgcaaagaggcggacatgcggactcggagacgggaaccttttcttttctaccagcaaaacaatgcgcctccttagatcatcagtttttttattctttcccaacgtgaatatgggcactcacacattttttatacccatcatacgatatgtaaagcagaaaaggttattttaacgcttaaaacaaggaggttacaccgtgaacaaatggctcaaagcgggctgcgtttttgtcatatgcgcctttttcctgctcattcttccggcttgcagacaggaagaaagtctgacgaaggtaaaggtggcggaagtcacacactccatcttctatacgcctctgtatgtcgctgaagcaaaagatttctttaaaaaagaagggctccaagtgtcacttcaaacaacatggggcggagacaaaacgatgacatcgcttttgtcaaacgggtcagacatcgcgctggtcggttctgaaacatccatttacgtggaggcgcagggagcaaaagatccggtcatcaatttcgcgcagctgacgcagacggatggcacatttctcgtgtcgcggaaggatgagaaatcattcaaatggaacgatttaaaaggaaaaacatttctcggccagcgaaaaggcggcatgccccaaatggccggtgagtacgtcctgaaaaagaatcacatagagccgaaaaaagacattaacctcgttcaaaacattgatttcgccaatatttccaacgcattcgcatccggaacgggtgattatgtgcagctgtttgaaccgacggcatcccaatttgaaaaagaaggcatcggtcatatcgtcgcatccttcggagaagcttccggccaagtgccatacacaacctttatggcaaaagaaagttatttgaaaaacaatgaaaagacggcggaaaaattcacccgcgccatctatcgcgcccagcaatgggtggaaagccatccggccaaagacatcgcaaaaacgattcagaaggaatttgccgatacagacccggccattatcgaaacatcgatagagcgctataaaaaacaaaagtcattctctgcagacccagttctgcaaaaggatgaatgggaactgcttcaatctattatggatgaagccggagagctcccgaaacacattccgtacagcaaactcgtcaacacaaaaatcgccaaaaaagtcacctcagaacaataggaggaacatgaatgtcttttttacatgtggatcatgtaacacatacttatttctcgcttaaagaaaagacaaccgccgtgaaagatatacattttcagattgaaaaaggggatttcatctcctttctcgggccgagcggatgcggaaaaacaacactcctgtccattctggccggccttatcacccctgcgcaaggccgggtgctgatcgaaggaagcgtgccgaaccataaagaacaccaaatcggttatatgcttcagcaggattatttatttccttggaaatcgattgaggaaaacgtgctgctcggtttacacatttcaaaaacattaacagaagaaaaaagagctgaagttctcagccttctgcctaagctcggattaatcggcgttgaaaagaaatatccgaaagagctctcaggcggaatgcggcagcgggcggcacttgccagaactcttgcgccggaccctggactgctgctccttgatgaaccgttttccgcgctggactttcaaacgaagctttctttggaaaaccttgtcttcagaacattaaaggattttcaaaaaaccgccgtgctcgtcacccacgatatcggtgaagccatcgccatgagcgatacgatctatttattttcgaatcagccgggcaccatccaccaaatattcaccgtgcctaaggagctcgcggctttagatccgtttgacgcgcgtcaggatccggcctttcagccgctgtttcaaaccatatggaaggagctgaattcccttgaaaaacagcagcggcacgattgaacagcttcatcagcagtttaagaaaagacaccaaaaagaaaagctccggatccgtgcgtatcaggccgccattttcatcgtattttttgccgggtgggaaatatcgagcagggcgggctggatcgatccgttaatcttcagctcaccctccgccgtttgcaggcttttagttgaaaagattgcggacggatcccttgcggcgcacatcggcgtaaccttaggagaaaccgttctcggctttttgctcggcacgcttctcggcacatgcctcgccgctctgttatggtggtcaaacagactcgcccgggttttagacccgtacctcgtcattttaaacgcgatgccgaaggtcgcactcggaccgattctcatcgtggcactcggaccgaatttcacaagcattgtcgccatgggagcagtcatcagtgtcattatcacgacaatcgtcgtctttacggcttttcaggaagtggatgaaaactatattaaggtgatgaaaaccttcggagcgaaaagaagcatcatgtttaaagaagtcattctgccggcatgcgcccccgcgattatttccgcgcttaaagtgaacgtcggtttatcctgggtcggtgtcatcgtcggcgagtttctcgtttccgaaaaaggtctgggctacatgatcatttacggattccaggtcttcaatttcactcttgtgttcttaagccttctgatcatcgcgatttttgcgacattgatgtatcagggagtcgaactgttagaaagaaaatggacgaaaggaaaaatataaaaaagacccgtgcgtaagcgccgggtctccgttttttatgattgaaatacgccgtcctctttcagctttttcagactgatcggaagcaccgaatctttcataatgaaactgaattttttatttcgggggagattctccggcagttcgctgaacagcaccggcccctttgtttcaaaatagtcagcctgtttttcaagcttttcaatatcggcaaaataaatattcttcacgattaccttttccctgccgagaactttatactgtccgacgtacttcagatgtcttaccgcggcgccggtttcttctttcacctcgcgcagggccgcttcctccgcacattccatcggctccacttttccgcccggaaattcaaacccccggtcttcgtgctcagtcaaaagccacttatctccatatcggcatatgacccatacatgcttcgggctgtctgaaaaaggctggtgttcaaaggagagctgaacagtattctgataatagtctttaaactcgtacatgtttatccctctaatccgttccttcatatcttccatacatcataccacagttgcgtttgttcggaagccctttatcaaaaattcagaggaaaaccatcatacccgctagtatagcctcctttgaagcaaatgttacggtttgcgcttgaatttatttttcaaagtatccaataggtcgacgagcacctgcggaaccgggatgcccagcgagcttgccgtaatcacgatctgaaccgattcgtataagatataaaacataatagccaaattgcggatggcgccttctgaatgaagcagctgatcaaaaaaatggcaaactgagactaatgccagggtcacgatttttttgaccagccgcgcaaaaagctttcttgcgctcagctgctgcaaaagagattcttttaagcttgtactgataaactcaatcgccatgaccgatagcaaaatcagaaacgaatactgaaaaccgccaaagaaaaaccccgctgccgacacgatcactgcaaaaaacgaaaagatgccaaagtctttgcccacttgatccaacatcctttcacagaaacggccttacattattctatgaaaagtgaatggaacggactggatttttcagaaaaatggacaacacctctcttcggcagccaaataaaagaccgagtgctttatagccccggtcttcccttgttgattatcctaaatacgctttcagcatccaattatgtttttcgatattctggtgaatggcaagcagcatatctccggtcgtttcgtctccgacctcatctgcgagatccatgccgcttttcagctcttccgcaatgacagtgaaatcatcataaatgttctgtaccatttgttctgcgctctcattgccttccgcctcttttatagaagcactcttcaatgattccgtcattgtgccgatcggcttgccgttcaatgccagcagacgttctgccagatcatcaatatatgtagccgtttcgttatacagctcctcgaacttttcgtgcaatgtgaaaaagtccttccctttgacgtaccaatgatagttatgtaatttcacatacatgaccgtccagtttgcaacttgtttattgaccgcttccaatagtttttctgacatgcctatcttcctcctttgatttactattgatataccctatatatcgtgtgttaaaacataaatttttagcccttgattttacggatggaaaatatgttatgatttgttaaaaaggagggatttcatgctgcttcttctgagcttcggctttcttatcgtgctcgccgtgctgcttttatccatctggtcgactgtaagagcttataacgtaaaacatacgattgacccgccggaggacgcatcaaaaggcttgacggataaaaacaatccttaatgatgatgcgtctgttcctcatggccggaggaatcatcggcagcttcagcatccccgacacgtacttttacagtcggcatattatgctgctgttttgccgttacgtgggattgaacggtatacacaccctcttcatcaaattcagtccgcaggtgatacgcccctttttcctccttggccttgcttgttttgctgctgcctttttttccttctttccatacttcaaacatgacttcatccgcatccgtgacacgcttgccgccgtaaaaaacctccgccttgtattccgttttttcatgcggtgctgccgtttccggtcctgtaagcttgacctcaagcgctttaggctcctcatccgcggcggttttgtccgaattgcccccgcaggaagataatagaaataccataccgcacatacctgccaatacagcccgtttcatcccatcactccttcatgtttgcttctattttagcaaacgcttacacataaggtgtgacattttttagaaatatgtaaaaaagcctttttgcatgtcagcaaaaaggcctgttttttatccgaacactttcagcaaatcttctttatcttgtgacagccagaaacgcatcagccgtttcgcgccttctaaatcatgaagtttcgcctggccgcactgtttttcgttggccgccggaatctccgtaatatcgatggcttctttcagcgtagcgtctagcaggtctacaatttcttccgctgtaggctcgccgctgacaacaagataatagcctgtctggcagcccatcggtgagatatctatgatgtcgaagtgatcgtatttctcagaatgtgtgcgaatcgtaaacgcaagcaagtgctcaagcgtatgaatcgtatccggcttcatcgcctgtttgttcggctggcagaagcgaatgtcaaacttattcacgacgccgtctgttccgactttatgcactccgcaatgtcttacatacggagccacaaccgcattatggtctagctcaaaactttctactgaaggcataatggcactccctttttttcagaatatgcatccattataacacagttttccgataagaattgtggcgaaagcttttcaatctgaaattttttttctatactagcatcagaaaggtggttttttaatgaaaaccataatgattgcgctcatccgcggataccagaagttcatctctccgctgacgccgccgtcatgccgcttttatccgacgtgttcacagtacggaatcgaagccgtcaagactcacggcgcattaaaaggcggatggctgacactgaagcggattttaaagtgccacccttttcatccgggcggtgttgatcccgtaccggacaaaaaacgaaaacattagtccatatgctggtagccgtcgatcaccagatcaagtttaccggtttcaggatcaatcaccagaccgtgcaccgggacattgtcagggaatagcggatggtgtttaatgacgtttacgctgtctgtaacactcgcttctactgaatcaaagcttttcagccattgatcaagatcaacacctgagtgcttcagcatgtcaatccgctctttcggaataccgcggtcgataattttatcaagcatatcctcgctgttgattttgctcatgccgcaatcatggtggccgataacgcagacttcatcagcgtttaattcgtatacggccactaaaaggctgcgcatgatgcttccgaacgggtgggcgacaagcgcgccggcacttttaataattttcacatcgccgtttcgcatgttcatcgcatgcggaagcaattctacaagacgtgtgtccatacaggacaaaattgccatctttttatccgggaatttagatgtttggtatttttcataatctttgtttttagtgaactgctcattaaattgcatgatatcgtttagaagactcatcttggtgtttcctttctgcttttttattcacaatataacataaggcgggtcatttcgtcactccccgcacgagatgataaagtgctcaataaataagacaaaccctattgggcttgtcttatttccccatattgtattttttgttgaactgttcgactctcccgcctttttcgttgaatttttggcggcccgtataaaacggatgcgtatctgagctgacttccactttaatcagcgggtatgtttttccgtcttcccactctgccgtttcctctgacgttttcgtagaatggcttaaaaagcggtagccgctgttcacatcttgaaaaatcacttggtggttatccggatgaatatcttttttcatggtgatctccctttcttaaatcgtaataattacgttttattctaaaccttaaataggcgcttgtcaatcatatatgccctgatcccttgatttctaaaccctgcacatatatggaatcggaagaataatctaatcgcttcagcaaataatataaccacattacataaaacggtaatttagaaaggcggtttatgatcgtggatgatttagtattagccagaagtctgttcgggacaaccatgggctttcatattatttttgcgacgcttggtgtcggcttgcctctgatgattttaatggccgaattgatttatcaaaaaacaaaagatccgcattatgccattatggcgaaaaggtggacgaaggcgcaggctgttctgctcggcgtggcgataccgaccggaacgatcgcgggtacacagcttgcccttttgtggcccggattcatggagatcatcggcagggtgatgtcacttccgtttcagattgaaatttatgctttctttatcgaagcgctgtttatgtccatttatgtctacgccgctgaccggctgactccggcgatgcgcatcattgccgttattttcgttttgatcggcgccgcggcatccgccgtcttaatcacaaatgttcacgcatttgaaggaacgccggccggctttaaaattttaaacggcaaaatcactgacgtcgaaccgtgggcagcgttttttaatccaagctttttcaccaccgcgggccatgtcgtactgacggctttcatgaccggtgcatttatcgtcgcgtcagttgcggcttataaaatgctgagaacgagaaaacaggagcaggtataccgctttcaccgaaaagcgctgctgctcgctttaacgatcggcgggatattctctattattgcttctttaaacggtcacgagtcagcccagcttctttacgaataccagcctgagaagcttgcgggcgcagaagggctgtttgaaactagatcacacgctccgcttgcgatcgggggttttactgatgcaaaagaagaaaaagtaaaatgggcgatagaagtgccgtgggctttaagctttttggccgcaaacagctttgataccgtcgtcaaaggattgaacgcgtttccgaaagacgagtggccgcctttattcatccatacactgtttaacggaatggtcggcatcgggatgctgctcattttgtactccatcatcggcatcgtgtggagaaaaattttaaagaaagacagctttccgacttggcttttgattttatttttaaccgcaggaccgctcagtctgatcggaattgaattcgggtggatattcgcttgtacggggcggcagccatgggtgatttaccatctcctgaaaacgtctgatgtcgtcacgacaaccggttcaatcggtttgctgttcatcctgttcacagtggtttacgccattttggcagccgcagtcatttatgtgctgctttattatttccgcaaacatcctgttgaggaggatgtaaaagcggcggaatcctaacaatagaaagggctgaattgaaatggacattaccatggatgctctcattgcgatatcaatcgtatggggcttcgtgtttatctacgcggtcatggcaacgatggacttcggagccggcttttggtcgatgatatatttaaataaagaacaaacaaaggcgacaaacatcgccaaccgttatttgtccccgacatgggaagtgaccaacgtctttatcgtcgcgatcgttgtcgccctattcagcttctttccaggggcaaccttcgtgctgggaaccgttttattgatcccgggaagtattattttgctgctcttagccatccgcagcggctttctcgtcttctccaatacggcgaaggaaagaaaaatcatgagatatatctccggaatttcaggcttcattattcccgctgtgctgattttggtccttccggtcacacacggagggtttattgagaagacgggcggagtgtatcacctgaatttggcaaatgtctttacaagtcttaatgcgtatgcgtttatcggctttgccattttaagcactttatttttatcttcactgcttctggccgatttttcaaatgttgcggaagaggagcatgcgtaccgcatctacagacggagctctttaataacagggccgctgtcgcttctgtttgccttcttcattatgctgacattacgctctgaagccggctggctgtatacggggatgatgaaagacaagacatggctcattctgtctgtcattacatttatcattgccggcgtggctctgtttttgccgaataagcgcttcggccgcaacctcggcaaaccgagaatcgccatgatcgccattgcgctccaatactttctggcaagctatgcatacggacgggctcatcttccttatatgatttatccggatattacggtcatgtcaggatttacggagccggcaaccttcagggcgctgtttatgacgtatatcgtcgctttcatcattttgttccccgggttttatttcttctggaagctctttatgaaagacagacgttatatccgccaggaggaataacaaaaatcagggcggctcatactaatggcgtaccttttatcttggaggggagccagcatggaccaaaaaattctgtgtgaagtcaataactgttcatattggggcagaggaaacaaatgcacggccgacgctatttatgtggtcagccatacaggcgaaaccgctgaaaaaagtgaagaaacggattgcaaaacctttaaaccgcaagatttataaaagaaaagagctgttttatacagctctttttcatttccgccgcaagcctccctgagccggagaaaaccgcgcggatgagaagcatggcaaaaaggcggttcggcggcaaatataggcggcagacggtacaatcagtatcgcattcatgacaagctcagaattttttatcaagatgtacatgtttgccccagccggaaagcagcacctgcgttgtaaagccggcactgtttgaagaataaaaaaatcatcgcatccgcctattaaaaaaaccggctgatacagccggttcaaacgggggaaggggtgataatgaacagcttcaatataacagcagcgtacaggcagctcaactcgctgaaatgtctttttatcagttgtttgtcgtaaaaacgtccatttgggtgacgtattttctcattatttcctgattgacttcaacacctagtccgggaccgtccgggacagagatgaatccctcttcgatacggatatcgggagtgacaatatcctcctcccagtatcggtctgatgaggaaatatcacccggtatcgtaaattgcggcagcgaagcaagcgcgactgtctgcgctctcgaaatgccggtttcaaacattccgccgcaccaaaccggcatgtgatgctctctgcataagtcatgtatttttaatgcctctgtcaggcctcctacacgcgccggttttatgttaatgattttacagctcccaagctcaatcgcccgccttgcgtcatcataagagcatatgctttcatcaaggcataccgcggttcttaagtgtttctgcaggtggcggtgatcgacaatatcatctgcctgaagcggctgttctatcatcatgagctggaattcatccaactctttcagcctgctgatgtctttcagttcataagccgagttggcatccgccatcagcggcacgttcggaaaacggctgcggatggctctgaccagatcaacgtcatggccgggctgaatttttatttttatacgttgataaccttcttttacgtattgctcaatttcccgaagcatctcatcagccgaagccagacccaccgccacgccggcgggcactttatctcttttgccccctaaggcttctgcgagagatatcccctttttcttggcatatagatcccacacggctgattcaagccccgcttttgccatgcggtttcctttgaaacgcgcgagactgtcaggcacttctgacggatggaaaaacgcgcggcctacgacatttgggatgaaaaaatctctcagcatatgcgcgcatgtctgaatcgtttcttctgtataccacggagaagaaaacgccgatacctcccccagccggttctcccggtttcgtcgatcgcttccacgatcaaaaatttacgatcctgcagcgtttcaatacttgttttaaacggttttttcagcctcatacttacatgataaagggtgattttttcaatcttaatcatgacaattctcctttacgaagctcattcagccgatgcctcatcagtttattggacgcgttccgcgggagcccgtcaaccttgaaaaaagcagctggtattttatattttgcaagccgctcacggcaaaaggcggtcagctcctcagaactgacagaagaagtcagcacgagaaaagcatgcggcactttcccccacttcggatcttcggctcccgaaacaccggcctccgctacagccggatgggcaagcagcgccgcttccacttctgcggggtagatgttctctccgcctgaaatgatgaggtccgaccgcctgtccagcacgtataaaaacccttcatcatccaaatagccaagatcgcccgttttgaaccatccattatgaaaagcggcctggttcgcgtcgtcacgatgataataccctttcattacattcgggcctttcaccgtaatttcaccatgttcaaacggcgcacaagggtttccgtctttttcaattctaatttcgcatgaaaacagcggtttaccggccgagccgagcttgtccatgctgaattccggagaaagtgtgacaatctgtgagcaggtttcagtcaagccgtaagattggaataccggaaattgtttcctgcggcattcttcaaggagcggcagcggtgccggacccccgccaagcagaatgcagcgcagtgattcaggacattgttcagtttccgcaagcaggcccgagagcatggtctgcaccgctgaaatgatcgtgacctgatgggagctgatgctgtccagcacatcagtgacagagaatttttgatgaagcacgacgggcatgccgtaaatgaccgacttaaacagcgcagacagaccgctgatatgaaacagcggcagcgcaataagccagcggtcccgctccgtgacccccagattcagcgcagacgatacagcgctggaataatgattaccgaaagtctgctgcacccctttcggccttcctgttgttcctgacgtatacataagagtcgccgtatcatcaagcgttacataagcttccggctccatgtcacccgcctcttcagcctgcagctcgtccacatctgcggtggcgaccgcagattcatattcttcgcggcaaaaaccgtcctccgtcaataaaagctttgcctgtgaatcttcgagctgaaacaaccgttcctgttttgagagcttcgtattcaacagcacagcttccgcccctaataagaagcaggcgtgaacggcataaaccatttccggtctgttagaaagcaaaatcgcggccctgtctccttttttaagcgagcagtatttggacagccgcgcggccatttgtttagaagcatgatataattctctgaatgtcatctgtttgttttcaaatatgagagcgattctctccggtgtcagctgagccctttgaatgagccaattcggctgttctgtcagcatgttatcatctccgaggtaaaagtactgtttttgaaaagaaaacagcttggaccagagcggctcaagctgtttcgtagtgtcatctgatcacggaaaacgagggaattgaccgaaatcgggactgcgtttctctttaaaggaatcacggccttctttcgcttcgtcagtcgtgtaataaagaagcgttgcatctcctgcaaattgctgaattccggcgaggccgtctgtatcagcgttaaatgccgctttaaggaaacgaagggctgtagggcttttctcaagcatttcttcacaccatttaattgtttcctcttcaagtttctctaatgggacaaccgtattgacaagccccatgtcgagcgcttcctgcgcgttgtattgacggcacaggtaccagatttcacgggctttcttatgtccgacgatacgcgccaggtaacctgagccgtaaccggcatcaaagctacccactttcgggccggtttgaccgaaaatcgcgttatcggccgcaatcgttaaatcacagacgatatgaagcacatggcctccgccgatggcatagcctgataccatcgctacgaccggtttaggaatcacacggatcaaacgctgaagatcaagcacattcagacgcgggatttgatcgtctccgacatatccgccgtgaccgcggactttttggtctccgcctgaacagaatgctttatctcccgctcccgcaagaacgatgacaccaatattggagtcatcacgcgcacaagcaaacgcgtcaatcatttctgataccgtcttaggagtaaatgcgttatgtacctccgggcggttaattgttatttttgcaataccgttatacgtctcgtacaggatttcatcgtactgacgttcacttttccattctgcagccattgatatgacctccttcatttttgcctgagtccggccgaaaagctattttctttatgctttacaagccgtataaaaactcacttactatcttaccaaaaattcgcggctgttccacatgtaccgtgtgccccgcctgtttgacaacctctattttacttgatgggagcaggttatgcaccttttgattaatagcgcaaaacttttcatcccattcaccgcatatgagcaggacgggcgccttgatgcggtgtaatgcctcccaccaggaaggctgtgagcctgtccccattccgagcaggcttcctgcaagtccggacggattattcttcagcctgccggcacggatggacgcctttacgctgtccggaagagaaagctgcgtggcaaacaacggaatgctctcccaataatcaacaaacgatgttacaccttcccgcaatataaagtcagcaagcttccggtctgactgaatccgttttttgcgttcctgaagcgtgctgaggcccggggttgtactttccaaaacaagcgctgacacccgatgcggaaatgcctgtgcaaaggaatacgcaagtcttccccccatagaataaccaataagtttcactttgtgaagttttaattgatcaaaaacggcggcaaggtccgcaacctgccggctcgcactataccttgccgcttgcacaggcgcgtctgtctccccgtgacccaggcagtcaatcatcaccattcgctcgccgggaaacatgccgcgtaaaaacatccatgattctttgctgcccgtaaatccatgcagacaaacaatagcttcagacgattcgtgtccgtgtccgctatcagcagcacgatagcatacgccgtcggccgttttaactgttacagtttccattcttttttcacttcccgcactgcggcctgcagcagatcgcgatggaattgaactcttgatgtccgatctgttttcagctcgattatatgaagtccgggcttgtccgcctgcggctgatacgcatccttaaatgcttcccatgtctcaggacaagtatacgtcccgccatacagtgcggcggcatgccggaaatcaagacccgtcggcgtaccgaacagttcttcaaaatgagtcttatcagatgcctgcggcaaaaacgagaaaatcccgccgccatcattgtttattaaaataaccgtaagcggaattccaagttttttagccgctaacagcccgtttaaatcatgataaaacgataaatctccaatgacaagcgtgacaggagcttttgtaccttcacacagtcccatagccgaggagacaactccgtcaatgccgttagcgccgcggttggcatagacacggaaggaacgatcttgtttttcaaagaaagtatccacgtcgcggatcggcatgctgttgccgacaaaaatcgaactgccttcagggacaaggtgctgaagctgacgatatacatttccttcaaatgataaatcatccatgctcgcggcctgtaaatgactccggaaccggtcattgacaaattgccatttctcaagccatccggacggccgttttccggtttcagctgaacggaccgcttccaaaaacacagacggatggcaatgaatcatatgcgcgccggcctgggtgggatctctccatcctccgtcttcatcgacgataaactgctcaatggcaggatcgtctctgagccataaaaagagcggtttggaaaccggcatcggaccgaagcggatcacagcgtcagggcgcagcgcctcttttatttcttcatcttttaagaacgagtcataagcatcaataatcagcgtcttatcatgctccccgtttcggaggtttgaaagcggatcagccaaaatcgggaactgaagcatctcggcaagcgcgatgatttgctgcttttctgcttcaccgtgaatttcgccgcagacgatcatacctctttcggtacccgcgagacgctctgtaatatgacagagagagtcttgatcagctgactgaatccctgttgtgactgagacgtgcttcccctttctcattctttcaaaaggtccggctgataaatccggcatcaaaggctctctgagcggcacattgatatggactggccccatcgggcgcttcccggcttcacttacggatctgccggccaatgttctgatatagctaagcatttgaggtttttcctcaggaagagctgagtctgtgaaaaacttaacaaagttaccgaacagaaaatgctggttaatcgcctgaggcgcccccacttccctcaattcatgaggccggtcagcagtcaggacaataagaggcactcttgaataatgagcttcaatcacggccggatagaagttagccgctgccgttcctgacgtacaaatcagcatgaccggacgctggcgggcttttgcaagaccgagtgcgaaaaaacctgcggatcgttcatcaatctgtatatggacttgaatatccgggtgggccgccgccaaaaccgccaggggagttgacctcgatcccgggcaaacaaccgcgtcggtgacacccgatagcgcgaattcatcaataaagcttccgatataatgtgtaatcgggtttgtcaaagcctttcacctcctaaagcagagatcatcggctttagtttaatttgtgtttcttcatattctgattgcggatctgaatcttcaacaatgccgcagcctgcgaaaagccgcgcacttttgccttcaatcagccctgatcggatagccacgacaaattctccgttttccctgccgtccatccagccgatcggagccgcataccatccgcgtgtcatcggttcaatatcagcgataacttcaacagctttctgctgaggagctcctcccaatgccggagtgggatgcagcttttcaattaaatcaaacagcgaagcggacgttttcagattgcctgtgatcggcgtatatagatgctgaacactttttgttttatataattgcgggcctgcaggctttttcacatcactgcagctcgacaagaaagaatcgtgtatcatcttaaccacaaaatcatgttccgcgagatttttttcgtcatgcagcagctctttgccgagacggtcatcttcttgttgattttctccgcgcttaattgaacctgccagacaggtggacataacgtctttgcctgattttttgatcagccgttccggtgaagcgccgacaaagcatttatctccctgctcaatcgcaaaaacatagcttgtcgtttggtccgtcaaaagcttgcggacaacgctctccgccggaataggcccatcatatgacaaaacgacttcccttgccagcacgactttatcatattgatttgccttcatatcatttgttgctgttttaatggcttcaagccagttttccacatcaagttcttccgcttttgttaaaacaggatattcttcatactcaattgaagaaactgcaaaagcttctgaaaaagatttcagacgtttcagcgtatcttctgcctgattaccgtctgccgcccattgattgacggttaaataatcgccgtctgccgtctttgtcagcatgagtgaggggataaagaacattccttcttcaaacccgttccattcgtctcctctctcttcagcgggattaaatgaaaaaccgccgaataagacagggccgaccgcggtatgcgccgcctcttcttcttcatgaatatgaaaagccgtctttttaaagcgctcccattgttcaaaaacgtcgtgataacgttttccatttttttcattcgattggaacagcgcttctgtgccaagaccgactattgttaattcactaccgggttctgaccaaaaaaatcgtttgcctttatatttttttgctccgtctttgaaaaatgatagagggtctaaagacgcaatacgtcttgaatagctcaataagacagcatggttgacttgtttggctttatgtaatgcatgatctgcttcctctcggaacgtatgctgcaccgttgtcaccatgagacattcctccataatccgttaaatgcttttaatacaatacacctgtgatgaatttgtgtcaaacacacagatttgagcacgacaaaatgcctgcatttcttattataaacctttttgcgcaaatgaataaagaaacaaacttgaattttctttccccactctcggcaatcactgtatccttttacttcctcgtgggaaaatgactatttttatccaccatttttctgcgtaaaaacgttcatactaacagtaagcatcacatagaaacgagggattgatgtgcttacaaacgaacagatcacacacttaaaaaaagaattggaagaagccagagatgatattttaagccgctttaaagaaaatgatcaatttcagttaactgatgaattcccgtatcaatcatccggcgaattgtcttcctatgacaatcatcccggcgatcaggcgaccgaattatacgagcgggaaaaagacctggctctgctcgaccatgaaagggagcaccttcgcgatattgattactctctgaaacaaattgaaaacggcacatacggcacatgtgaagtcagcggcaaggacattccttatgacagacttgaagctctgccgacggctacgacattggcggaatattcctcgcaggatgccgtttccaaagacaggccgattgaagaggaaacaccgttcggacagtttgaatttgatgatgatgaatcaatccgggcggcttacgatagtgaagatgcttatcaggatgttgagggatacggaaactcagaaacgcctcaggatttagaagatccgccgctcagctatggggatatgacaatgaactcagaagaaaacatcggctatgctgaggattatgaaaactttatcgcgacagatattaccggaaaaaacatttccgtgtatccaagcaaggcacacgaaaaatatgagcaggaactggacgaagaaggaattatgacgacctttggcgaccttcatgctgattaaaaccccggcaggccggggtttttgaatacaaataattggtttgctgcattttcacaccgaaaactcatacacttaatggtgcatgaaccttttgaacggtttaatctttccaagaaagggaactaacgtattgacattgaatgacggagggaacaaatgaaaaagaagtatatcggtgcgattattgtatttatcattacatatgtcttgttttctttagcagggtttctctttcccatcgaccgggaatggtacgacgcgctgcaaaaacctgactggacgctgggcggatcagtgatcggcatcatatgggcggttttgtttgcgcttatttcgctctcagcagccttaatatatgcaaagttttcatgtaaagaatccaaagctttttgggtgatgcttctcatcaattatatcgtgaatcaaggattcagctattttcaattcacacagaaaaatttgcttgctgcatctatcgattgcctgcttgtggctgtgacaacactcattctgttgctcattgccggtaaatacagtaaagcttcagcctggcttctggttccttatttattatggagcgcttttgccacatacctgtcttttaccatttacgctatgaacgcataataaaaaaccttgcatactatgcaaggtttttttaatgacccgtacgggattcgaacccgtgttaccgccgtgaaagggcggtgtcttaaccgcttgaccaacgggccttatggcggagaaggagggatttgaaccctcgcgccgcttacacgacctacacccttagcaggggcgcctcttcagccacttgagtacttctccgtatggctccacaggcaggattcgaacctgcgaccgatcggttaacagccgatagctctaccactgagctactgtggaaaaatcatcatggtgggcctgagtggactcgaaccaccgacctcacgcttatcaggcgtgcgctctaaccagctgagctacaggcccatgacaatataaaaatggagcgggtgatgggaatcgaacccacgacatcagcttggaaggctgaggttttaccactaaactacacccgcatgttgtttggggcgattgatgggaatcgaacccacgagtgccagagccacaatctggtgcgttaaccacttcgccacaaccgccaaaacaatattaaattaaatggtggctcgggacggaatcgaaccgccgacacacggattttcagtccgttgctctaccaactgagctaccgagcctttttataaatggcggtccggacgggactcgaacccgcgacctcctgcgtgacaggcaggcattctaaccaactgaactaccggaccattttttggttgcgggggcaggatttgaacctgcgaccttcgggttatgagcccgacgagctaccgaactgctccaccccgcgatgataattaaattagatatggcggaggaagagggattcgaacccccgcgggctttgacacccctgtcggttttcaagaccgatcccttcagccagacttgggtattcctccgtataagtggtggaccttgtaggactcgaacctacgaccggacggttatgagccgtctgctctaaccaactgagctaaaggtccaatggtagcggcggaggggatcgaacccccgacctcacgggtatgaaccgtacgctctagccagctgagctacaccgccaaaaacaattaaaatcaagtggagcctagcgggatcgaaccgctgacctcctgcgtgcaaagcaggcgctctcccagctgagctaaggccccaaagtggtcgggaagacaggattcgaacctgcgaccccatggtcccaaaccatgtgctctaccaagctgagctacttcccgtttttcaaaagtatgtatggcgcgcccgagaggagtcgaacccctaaccttttgatccgtagtcaaacgctctatccaattgagctacgggcgcaacaataagtgccgagggccggacttgaaccggcacggtagtcacctaccgcaggattttaagtcctgtgtgtctgccaattccaccaccccggcatggatggtatagtatagttggagcggaagacgggattcgaacccgcgacccccaccttggcaaggtgatgttctaccactgaactacttccgcgtttggcaatgcggatgaagggacttgaacccccacgtctgtaaagacactagagcctgattctagcgcgtctgccaattccgccacatccgcaagaaaaacatggtgagccatgaaggactcgaaccttcgaccctctgattaaaagtcagatgctctaccaactgagctaatggctcttattacaagagacttatatagtataacatataaaagtggtgccggcaagaggacttgaacccccaacctactgattacaagtcagttgctctaccaattgagctacaccggcctaatacgccaacttatgtatgattggaatggtggaggatgacgggctcgaaccgccgaccctctgcttgtaaggcagatgctctcccagctgagctaatcctccgtatattacacttacgtgtaatggcttggcggcgtcctactctcacagggggaaacccccgactaccatcggcgctgaagagcttaacttccgtgttcggcatgggaacgggtgtgacctcttcgctatcgccaccaaaccattgagagtgttctctcaaaactagataacagtaagcatacattcaaattggttaagtcctcgatcgattagtatctgtcagctccatgtgtcgccacacttccacctcagacctatcaacctgatcatctttcagggatcttacttccttgcggaatgggaaatctcatcttgaggggggcttcatgcttagatgctttcagcacttatcccgtccgcacatagctacccagcgatgcccttggcagaacaactggtacaccagcggtgcgtccatcccggtcctctcgtactaaggacagctcctctcaaatttcctgcgcccgcgacggatagggaccgaactgtctcacgacgttctgaacccagctcgcgtaccgctttaatgggcgaacagcccaacccttgggaccgactacagccccaggatgcgatgagccgacatcgaggtgccaaacctccccgtcgatgtggactcttgggggagataagcctgttatccccggggtagcttttatccgttgagcgatggcccttccatgcggaaccaccggatcactaagcccgactttcgtccctgctcgacttgtaggtctcgcagtcaagctcccttgtgcctttacactctgcgaatgatttccaaccattctgagggaacctttgggcgcctccgttaccttttaggaggcgaccgccccagtcaaactgcccacctgacactgtctccccgcccgataagggcggcgggttagaaggtcaatacagccagggtagtatcccaccgatgcctccaccgaagctggcgctccggtttccaaggctcctacctatcctgtacaagctgtaccaacattcaatatcaggctgcagtaaagctccacggggtctttccgtcctgtcgcgggtaacctgcatcttcacaggtactataatttcaccgagtctctcgttgagacagtgcccagatcgttgcgcctttcgtgcgggtcggaacttacccgacaaggaatttcgctaccttaggaccgttatagttacggccgccgtttactggggcttcaattcgcaccttcgcttacgctaagcgctcctcttaaccttccagcaccgggcaggcgtcagcccctatacttcgccttacggcttcgcagagacctgtgtttttgctaaacagtcgcctgggcctattcactgcggctctctcgggcttgcaccctaacagagcaccccttctcccgaagttacggggtcattttgccgagttccttaacgagagttctctcgatcaccttaggattctctcctcgcctacctgtgtcggtttgcggtacgggcacctctcacctcgctagaggcttttcttggcagtgtggaatcaggaacttcgctactataattcgctcgccatcacagctcagccttcacgggaaacggatttgcctatttcccagcctaactgcttggacgcggatatccaataccgcgcttaccctatcctcctgcgtccccccattgctcaaatggtgaggaggtggtacaggaatatcaacctgttatccatcgcctacgcctttcggcctcggcttaggtcccgactaaccctgagcggacgagccttcctcaggaaaccttaggcattcggtggaggggattctcacccctctttcgctactcataccggcattctcacttctaagcgctccacaagtccttccggtcttgcttcacagcccttagaacgctctcctaccactgttcgaagaacagtccgcagcttcggtgatacgtttagccccggtacattttcggcgcagagtcactcgaccagtgagctattacgcactctttaaatggtggctgcttctaagccaacatcctggttgtctaagcaactccacatccttttccacttaacgtatactttgggaccttagctggcggtctgggctgtttccctttcgactacggatcttatcactcgcagtctgactcccaaggataagtcatcggcattcggagtttgactgaattcggtaacccggtaggggcccctagtccaatcagtgctctacctccgagactcttaccttgaggctagccctaaagctatttcggagagaaccagctatctccaggttcgattggcatttcacccctacccacacctcatccccgcacttttcaacgtgcgtgggttcgggcctccattcagtgttacctgaacttcaccctggacatgggtagatcacctggtttcgggtctacgaccacgtactcaattcgccctattcagactcgctttcgctgcggctccgcatcttctgcttaaccttgcacgggatcgtaactcgccggttcattctacaaaaggcacgccatcacccgttaacgggctctgactacttgtaggcacacggtttcaggatctctttcactccccttccggggtgcttttcacctttccctcacggtactggttcactatcggtcactagggagtatttagccttgggagatggtcctcccggattccgacggaatttcacgtgttccgccgtactcaggatccactcaggagagaacgaagttttgactacagggctgttacctcctatggcgggcctttccagacctcttcatctacctcgttcctttgtaactccgtacagagtgtcctacaaccccaagaggcaagcctcttggtttgggctggtcccgtttcgctcgccgctactcagggaatcgcatttgctttctcttcctccgggtacttagatgtttcagttccccgggtctgccttctcatatcctatgtattcagatatggataccactccattacgagtggtgggtttccccattcggaaatctccggatcaaagcttgcttacagctccccgaagcatatcggtgttcgtcccgtccttcatcggctcctagtgccaaggcatccaccgtgcgccctttctaacttaaccgttaaaaagaatcactacgtgatatcttgcattactaattgaatgtgaattacttctgttatctagttttcaaagaacaacgcataggacatgctaacacatgcgttgccacaggaagtggcgcatttagcaggtgttcctatgttttgaaggaatgatccttcaaaactaaacaagacagggaacgttctgtttataagacccaaggtcttatattccgttaaaatccttagaaaggaggtgatccagccgcaccttccgatacggctaccttgttacgacttcaccccaatcatctgtcccaccttcggcggctggctccataaaggttacctcaccgacttcgggtgttacaaactctcgtggtgtgacgggcggtgtgtacaaggcccgggaacgtattcaccgcggcatgctgatccgcgattactagcgattccagcttcacgcagtcgagttgcagactgcgatccgaactgagaacagatttgtgggattggcttaacctcgcggtttcgctgccctttgttctgtccattgtagcacgtgtgtagcccaggtcataaggggcatgatgatttgacgtcatccccaccttcctccggtttgtcaccggcagtcaccttagagtgcccaactgaatgctggcaactaagatcaagggttgcgctcgttgcgggacttaacccaacatctcacgacacgagctgacgacaaccatgcaccacctgtcactctgcccccgaaggggacgtcctatctctaggattgtcagaggatgtcaagacctggtaaggttcttcgcgttgcttcgaattaaaccacatgctccaccgcttgtgcgggcccccgtcaattcctttgagtttcagtcttgcgaccgtactccccaggcggagtgcttaatgcgttagctgcagcactaaggggcggaaaccccctaacacttagcactcatcgtttacggcgtggactaccagggtatctaatcctgttcgctccccacgctttcgctcctcagcgtcagttacagaccagagagtcgccttcgccactggtgttcctccacatctctacgcatttcaccgctacacgtggaattccactctcctcttctgcactcaagttccccagtttccaatgaccctccccggttgagccgggggctttcacatcagacttaagaaaccgcctgcgagccctttacgcccaataattccggacaacgcttgccacctacgtattaccgcggctgctggcacgtagttagccgtggctttctggttaggtaccgtcaaggtgccgccctatttgaacggcacttgttcttccctaacaacagagctttacgatccgaaaaccttcatcactcacgcggcgttgctccgtcagactttcgtccattgcggaagattccctactgctgcctcccgtaggagtctgggccgtgtctcagtcccagtgtggccgatcaccctctcaggtcggctacgcatcgtcgccttggtgagccgttacctcaccaactagctaatgcgccgcgggtccatctgtaagtggtagccgaagccaccttttatgtctgaaccatgcggttcagacaaccatccggtattagccccggtttcccggagttatcccagtcttacaggcaggttacccacgtgttactcacccgtccgccgctaacatcagggagcaagctcccatctgtccgctcgacttgcatgtattaggcacgccgccagcgttcgtcctgagccaggatcaaactctccgataaatggaacacagactaagttcactgcatcctgcagtaacgtctgtgtgatctgcatcgtgcagaccttagtttgactgactacgcacatcactgtgcgatttatttaaaactttgaattaacaggtacgttttgtcttgtttagttttcaaagatcatgaccgcttattgaagcagctttattatcttaccacccagcttcttttatgtcaataactttttttaagttgtttccgaagcttttcgttgttgtctgctgttcatcagcgacgtttaataatataacacccttttgaaaatatgacaatagttttttaaaaaaaatcattaattattttctttcatacttatttcagtttctcttctatagaaagataagctgtcttgtggtttggtatattttcttgtatagtaagattgaactaaatacttgatgaccacaaggggagcattaaagctgagagtgaacgttttgttctgaccctttgaacctgttagttaacgctggcgtagggatgtggcaaagccaaatgatttgcagtttatgtaagcagcgcgcggaccttttcccatccttccccgcgctgcttttttgtttatccttgatacggttgtctgaccagggggaaaactatgaatcattcaacacagcttgtgcgcttaattgaaatagcgattatgaccggggcggctgtcattctggacattgtctcaggcatgtttctccggatgccccaagggggttcggtctctattatgatgattccgatttttttgatttcattccgctggggagtgaaggccgggcttacgacaggctttttaacagggattgtccagatcgccatcggcaatttgtttttgcagcacccggtgcagctatttcttgattatatcgcggcatttgcagttctcggtttcagcggcttgctcgcttccggtgtacgagcatcggcattgaataaaaaaagaggcgctttaacgatgtatgttataggcggtgttttcaccggcagtgtgctgcggtatgcggcgcatgtggtctccggagcagtctttttcggaagctatgctccgaagggtacgccggtctggatttattcatccgtctataacgcgacttacatgattccttcttttatcctttcggccattgtccttatcttattattcatgactgcgccgcggcttcttgaagctaagcggacgaactgaaacagcaggcggtttacgcctgctgtttttttattccgggctgtgccgttcgttagaatcactcagttcttttgtaagttcatttatgctttgttttatgtttcctttgcctgaaaaattctcaatcagctcttttacattgattccggaagatgcttttaagctttcctggagaccggccattaaattggttgcgtagcctgtgactttattggccccgccgttttcaccgcttcctcccgtatccacgacggtaattttatcaatgtttgaaagaggcgctgagacttgttttgcgtattcaggcagcattttcacaatcatatcaaggattgcagcctgcccgtatttttcgaatgcgtcggcgattttttctttagcttccgcttctgcgagacctttcaggcggatgacttccgcttcggtttctcctctcgccttttcagcctccgctttagcaagaccgtcaattctcacgcgttccgcttccgccttggccatcgcttcgatgctgtactgctcggcatcggcttcggcgagctgcttcgcttttgcggccgcggccgcttgttccaccgagtaacggtcagcatcggcttttttcttcacttcagagtcatattggcgctcacggcgcagaatttctttttcctccaattcaatctgcttttgccgctcaataattttaatttgcatttcctgctctgtcacctgctggcgcgcttttgcggtttcaagatcatatgcctggtcggcattggcttttgctgtatcctgctctcttctgtattccgccattttcagctgattgattttttccgcttcagctatttccgtcgcccgctccagctctgatttttttgcgtctttatcagcggccgcgcgtttaatcctcgtctctttatccgcttctgccgtggcaatgtccgcatcccgcttgacttgggcgattctcggcttgcctaatgattcaagatagccgtttttatcccggacgtctttaatcgtaaaagaaacgatcatcagccccattttagcaagatcctgagacgcgacccgctggacttcctgagaaaacttttccctgtttttataaatctcttcaacggtcatggagccgaggatggagcgcagatggccttccagcacctcccgcgcctcctgctcacggtcgtccttggatttccccaaaaattgttcagctgctgtggcgatttcaccgatggagcctccgattttaataatggcggttccgtcggccattaccggcaccccttgctctgtatagacttcaggtgtagagacatcaagtttgcttgacagtaaactgagaggttctgcctgctggaataccgggagcacgaacgttcccccgccccggacgattttcagacgatttccgccttcatcaatgtggacgttcttatttcccaaataacttccggtcacgataagggcttcgtccggccccgctgtccggtacttcgtaataaatacagcaataagtgcgatgagtaaaaagaatacgattccgataacaatgataatcggcatagtcataacagttcccccttagatatcagattggttcatgcggcgtcacaaaaagcactccgtctttcacgtcaatcactaatacggccgttccgtatctgatctgttcttgatcaaagctgacggctgatttagaaatggcgccccctattccctctatgatcacttccccatagccgtctttcgggacggaagtaatgaccctgccgaccctgccctttaaatctgtctcccgatatgcgagcgattcttccgctgatgaaagcggggcaaggacgaagaagtgaagcaggctgaccaaaagaaccgaaagaacaaatgaaagcaacgcaatgacaggacttgatagcggagcggcgatttcgccgatataacctgaggctgaaaagattgttaaaaaagacagaatcaatgcagggtttaaaaatgaaacaggaatggcttctgagaggccgtgaaacacatcttgaaaaaacagaatcaaaagcgtgagacttcccgaaataatcaatgtgtaaagatagaccgtttcaaacggcagatgaaatatgtccacattctatcctcctttcggctgaggtgtcggagtgttactttatatacggatgtaaaggtaaatggtttcaattttctgataaggaaggctgattacatgattatccaatccggatatgatatgtttactctaaaggaggagataggatgagcatttttaatgaagccagacagcagacctgggaagtactgaaagggctctctgatgaggaattcaaccgaaagcccgcggctgatgagtggagcgtgcgggaagtccttgaccatttaaagaaaattgacgaaacagcgcagacccttttatcaaagcaggcaaaagacgcaccgtttaaaaaaatcgaagacaaaccgatggagtttatagaggacagatcaaataaacggccggcgccgtcacacctcgaacctgagcaaaaccgaatctcagtcattgaagcaaaacaagaattagatacggcaagacagcagctgaccgcagttatttcatcattaaacgaggaagattttgaacgtgtgcttccgcatcccgtttttcaagaactgacgatccggcagtggattgattttatcggccatcatgaaaagcgtcacatcgatcaaatagaagaaatcaaacaaaaaatcgagaaggtctgagtcagaccttctcgatttttttcttggcgcgtttcggttcataggaatggatggtgaccgcatcgcccgtgcatatatcacccgggcgttcaacaatacagacaattcctcttctgcccatcgcgtgcctcacaaacgccgcggcgagttttggctgagccggataaaaggattgaatgacttctcccggctgaatgcacggatcattttctccctcgcacaacagagacgcaccgcttggaaaaatcattctgcttccttctttaagcggcgtcagcgcagaaaaaccgctgattgcgatgttagcgccgagccattcgggaaagatatgagaaatccccatcttctccgcaatgtcatcacattcctccatggacacgattgaaatttgtctccggttaaaaatttctgttcctctttcatacatcggctcacgcgcgccggccttttttgtcagtccgaaatgcaggtcaccgggaaacccgccgtattccgcgcgaagcttgtccatctttttggtaacaaattgttcggtatccgctatatatacgccttccgtctttgctgttatgcgtttccacatcagccaccaccgcctttttcttgacattatccttaaaaaaccccgctctgtaaaggagcggggttcatttattataccgttttcggcgttaagtcaaagcagcgtttgtaaatccagttgtatgctttctcattcaaatctcttggatttccgaaagtctgcggatctttcatggcttcttttgataaacgttcaatcatgtccggagacacaccttgttcttctaaactcggcacttctaaatcttttacaagatcatacatccagttgacggacgctttggccgcttcttcggttgtcatgttgcttgtatcgattccgaatgctttggcgatgcgggcgaatttttccggatagcctttccagttgtattccattaccggtcccatcatagctgcgacgcattgtccgtgagcgacagggatgatgccgccgagcgtctggctcatcgcatgcgccgcgcctgctgattcactgccgtatgaaaggccggcaagcatcgccgcctgcgccatgccgtatcttgcttccaaatcctctccgtccgcaaacgcgcgcttaatataatgcgccgcatattcaatggccattaaagcgacggcatcagtgatcggctgcgcgaatttcatcgtatagcactcgatggcgtgcgcaagtgcgtcaatacctgtcatggccgtcacatgcggaggcatggacgtgtgcagctcagggtcaatgaccgttaaatgcgcagcgataagcggtccgcccgtattgaatttaaattctctttcctcatctgtaatgaccgcccattgtgtgacctctgaacctgttcccgcagtcgtcgggatcgttgtcagcggaggaatgcggttttccagcggctttttgccttccgcggcttcataatcaagcacgcttccttcgtgtgtcgcttctaccccgatcgctttcgccgtatccatggagcttccgccgccgacagccacaagaccgttgcagttttcttttttatacagttctgatccttcgtttacaagacgtacaggcgggttcggctccactttgttaaacaggacgacttcgatgcccgcttcctgcaaagattcaatgaccgggtttgccactcccgcgttataaattcccgggtctgttacgagcagcgcttttgtgacgccaagcgctctgacttcacttcccgcgtgctgaatcgcgccgattccgtgtttaatgactgtcgggatttcgaatgtatggaatttatgcatgctttctactttcatatttaatgtcatattgtatctcctcctaattatgcttgaaaccagttcacagccgcaggtttcgtattgcggtaaatatgtttgatttccgtgtattcttccaggccgattttgccgagttcacggccgaagcccgattgtttgtacccgccccatggcgcttgcgcgaaatacgggtggaaatcattgatccataccgttcccatccgcagtttggcggctacgcgttcgcatttttcaatatcctttgaccataccgctccggccagcccgtaaatggtatcgttggcaagtctgatcacttcttcttctgaagagaatgactcgactgttaaaacggggccgaagatttcctcttggactattcgcatatcagacttgcagtttgagaaaatagtaggttcatagaagaaaccgttttgaagggcgggatcatcaggacgtttgccgcctgtttccagttttgccccttcttcgataccgatttctacgtatttttcgactttggcccgatgctcggcggaaatcagcggaccgctttccgtatcttcatgaaaaccgtttcctaatttgatgcgtttcgtgcgcttgatcagctcggctaaaaattcatcatgaatggcttcgtccaccaaaagacgtgacccggccgaacaaacttgaccggcatggaaaaacacggcgttcagcgcttgatctgcagctgtttcgagatctgcatcttgaaatacgatattcggatttttgccgccaagctccagggcaatctttttcacgttgccgcttgccgcctgcatgatttttttgcctgtttcaattccgcccgtaaaagagaccaaatcgacgtcgaggtttctcgccagctcatcgccgacagaggcgcccggccccagcacgagattggcggcccctttcggaataccggcttcttctattaattgaaagactttaatggttgtaagcggagtaatctcgctcggctttaaaacgatcgtgtttccagccgcaagagcgggagcgattttccagctcgcctgaaggagcggatagttccacggcgtaatttgtccgcatacgccaattggctctctgacgattttacttactgaatcgggaatcggagatgaaatgacttcgcctccgtctttatccgccaaaccggcataatattgaaatacatttgcgatatcatccatatcggctttactttcttcaatcgtttttcctgtatcaagcgattccagctcagctaattcgttcagatcgcgtctgattaattccgcaattttcagaacaaattgtccgcgctcgagcccggaaagcaccggccattccccttcatcaaatgcttttctggctgcggcgatggctttcaccgcatcatcccggtctccttcgcataccgttgcaatttcttcttgattaaatggattaatgatacggcgggtctgttttttttctgcactgatccattcgccgccgatataaagcgttttgctcataagagtcctccttaccgagaagtaagtttgttaaataaaaatttaatgtttttaacaatgttaatttaacacatgtttttttgcctgtcaaaacccggtcagtccgtttagattttgacattttgtcatgattcgttaagattaagaacataaagaaatgacttaacaaatttaaacttcaagaggaaaagagggacagtatggatgagaatccagaattcgcagctatagaacaagccagggatcttgtcattgattccattgcagagacgatggatctttacggaatcacccggagtgtcgggattttatacggaacaatgtatatgagggatgaaatgacgcttgacgaaatgcgtgaggaactgcagatgagcaaaccgagtatgagcacgggcgttaaaaagctgcaggatttaaatgtggtcaaaaaaacctttcaccgcggcacacggaagcatacgtttgtagcggaaaaggatttctttacgtttttcacgaatttctttccgccgaaatgggaccgtgaagttcaggtgaatttgtccgccatcgtacaggctcaggcggatttgcagtccgttttgctggccgaggaaggcagcgcggaattacaggaagaagcgcggcagttatatgatcagcttgaaagctcgaaagcttattatcattggctgaagcggctcgccgactcggttcagagcggggagatttttaaatttattccgatagaaacggacgaaaaaaacgcctgattttgattcaggcgttttttgtcgtgatttgattatttttgagaaaatataggaacataaccccatttacttccattaaaattgatggtaaatttttataggtatggtcgttcttttttaagaacaatcagcaaattttttttagggggatttataaaaatgaaacacaagtttttctcaactgtcatggcaagtttattcggcctggttttgcttctttctctgccgacagcgtcattcgccgctgagtcaggctcaaccgttcacgagccggaaatgtccacgaaagcgactgctaccttatttgcaaaatatacaggtgccagccagcaggaatggtcattttctgatatcgaattgacgtaccgtccgaacacgatcctgagcttaggcgttatggaatttacccttcctagcggatttgcggctacaacaaaagatacagtcaacggacacgctttgcgcgaaagacagattctgaataacggcaaaacagtcagacttccgttaaacattgatttgctcggcgcagcggaatttaagctttctcttaataataaaacattgcctgctgcaggtacatataagttccgtgcagaaaataaatcattaagcatcggctctaaattctatgctgaggacacaattgttgttcaaaaacgcagcacaccgccgacacagccatgcaactgcaaataattgcgaaaaacggaccggcacaagctcatcgcttgtcagccggtctttttttgtgctgttttctttcttccggccctcgcattgacaaacccctgaaacaggagtacattcttgtttgttgtatttggagtgacgaaaacagtttcttaaggagttatgaggattgggaaaaatcaaaaataaacaatttgccgtcatcggactcggccgtttcggcggaagcatctgtaaagagctttttaaaatggggcatgaggtgcttgcgatcgatatcagcgaagagcgggtcaacgcatactcctcttatgccacgcatgccgtgcgggcaaattcaacggaagaaagcgagcttcagtcgctcggcatcagaaattttgaatatgtcatcgtagcaatcggagccaatatacaggcaagcacgctgacgacgctgttattgaaggagctgaacatccctaatatttgggtgaaagcgcaaaactattatcatcacaaagtgcttgaaaagatcggtgctgatcgtattatccatcctgaaaaggatatgggcgtgcggattgcgcaaagcctttcagatgaaaacgtcttaaattacatcgatttgtcagatgaatacagcattgtggagctttcagccactaaaaagctgcatttaaaatcccttcttgatctcggcgcacgcgccagattcggctgcaccattctcgccgtgaaacataatggagacattcagctgtccccttctccggagactgtcattcatgaatgtgactgccttgtgctgatggggcataaacgtgatattaaaaggtttgaaactgaaggaatgtaaaaaaagccggcaagctgccggctttttttgatgcttatgtttcttcacttaactggacggcggtttggtcaacccagccgaccagcttatctttcacttgaatttggtaccagacggattctccgttttgtttttcagatacgactttaatatgctggccggtaaacttttgcgccgatgccagtttaatagaatgccgctctttcgacggcttggaccacacgtcttcaatggcgtggtctttgatggcgcctttcttatcaactgctttaagagaggcattgattttgtcatattcattcaggttataggtttctatgacatctttaattttttcagcatagccggggtctgtggcgtagccggatttttgaagggcagccgccgctgttttataattgtccgcttcaatgacgggcttgtacttctttttattccaagacgttccgttgacaaataatttggcatggtcatccattgattcaaaaaacgtgctgtatttacggaattttgcccgaatcgtttttcgttttcctttttcaaattcatccgttttcatcgtgacgtgttttcctttataatcaccttttacaccgaacaggttgcgcgctttccccgcaagctcactgttcccccagtccgattcgagaatggcctgtgcgagggtgatgctcggaaggacatgatatttctcatataaaatttgagcatgcccggaaaggctgtcaataaagacctgctgctcgtccacctcttcaggcggtttttcttccgtcactatgaatttcgaaaataccattgataccagaaataatccgaatataagagatacagcaaaaaggcacccaagcacccttttggtctttgctttctttttcatatcaaccttcctttaattccggaatcactagatttataattttactggtcattgatgaaaatttcaataaaatagggaaaaagacggagaaagaacacatcgtgcaaataaaaaagactcctcaatgaggagtctttttttgttatgccatgctcagctgagggccgaacaattcaaattgaacggaatcagagtcaaacccgagtgcaagaatcatatctttcatttgcgtcataaactgtgctgatccgcacaagtaacattcagcatcttgattcagatgaagctgctccaagaaggtttgatcaatccggccgctgtaaaaaggcttgtctcctgagcggtcttgttctgccggttcactgtatacataaatgacgttaatattcggatgattctccgcagcttgttcagcctctttgcggaacgcggcgtactctccgtttttcgcggcatgaataaaagtaacggaacgctcgggctgtttttcggcggctgttttcagcatgctcatcatcggcgtgattccggaaccggcactgataagaacaaccggtttttcggaagaagacagcttgaaatccccggcgggtgcactgacttcaagtttatctccctcttgaacttcattgtggagatgagaagaaaccgctccgtcctttttcacagatatccgatatgcgccttttcgagaagcatcagacaggctgtactggcgaatgtgcgtataaggagaatccgcaatcctcactttaatgctgatatattgtcccgcttcaaatccaggaagcgaagagccgtcactcggtttgatataaaatgatgtgatatctttgctttcttttgttttctgtataaccgtaaattctttatacccctgccatccggcttcactgtacatgtctttttcaatgccgataaaagcctccgcaataacaccgtaagctttttcccatgcctgcataatttcaggagttgcggcatcctgcagcacatccttaatcgccagaagcagatactttccgacaatcggataatgttccggttttacaccgatacttgtgtgtttatggccgatctgtctgaccgccggaatgatttgttctaattgatcaatattcgccgcagccgcaataactgcatttgccaatgctgcgcgctgagtctgtttcttttggttcgtttggttaaacatatttaacagttcgggatgatcttgaaacatcaggttataaaagcgtccggtgatgttttctccatgtgtttttaatacgggtactgtgcttttgatgatgtctactgttctctcatccagcatgttcatcctcaacccttctaaagatgtatttttaatatatctttatagtaagagatatttcgaataaaagatatatctaaaatgaatctttaaaaaagtcgtcacaatattgtgttgaatttggaatttatggattttacctccttttttatcacccggtgaaacagggacacatatatttgggaatatacgtttaaagatgaaagcgggggattgcatggtttccgatatcgattacacgtctccgaatacacagttcacttatgatgtaaatgagagccgtttttttacgaaagatgctcggaactttatcaatgtattggggattaaacagttaaacacgcttgaaaatatttcattattagatatctttctgagtaaaacaaatgtgattgaaccgcatacccatcaaaacgccgctgaattggtgtactgtatttcgggttccgcggtggtgtcgatgctgaatccgttcacccagaaaatacggaattatccgatctctccaggacaagtggcgaatgttccgcaggggtggtggcattatgaagtcgccacttcagacaaaacccaccttttggccatatttgacgccccttcgcctgaagtgatatatggctcggatattctccgtctgacgccgcctgagatcatggcgcatacgtactgtctgaatgagcacgagtgggaaaaagccgtttcaccgatccggcaatcaactgtgataggtcccgataaatactgcggacagtctgaaaacacgggtattcatgatatgaataagccttatcagccaaatacgcattatccgaatgatccgtatcggcattatgttcagccgttctatagggggtattaagcggatccacatcgacagaaagagcccctcattgcagaggggctcttgatcattacgatccggttccgcagcttactttgtactcgccttcggacgatttttttgaataacatacgtgcggcgtctgtccggtttcatctttccaattgaaccaatttacataataaaggttcccgtcctctccgcctccttcttctttttgaagaatcgcaaagtagctttgatacggatatccttttttataaatgtcatgcctgatggctcctttttctgaagcagacgtgaagatgacaggagaaagagccgggagcgccgttaaaagaagtgccagtgcagctgacagagataatataagatagattttctttttcattttctctctttcctttattttgagttgttagaaatgaagcggaacacagaggctgctgcagaggatgaaaaaacaaaaaaacccttatttatagaataagggtttaaaggtatggagccaagggggctcgaacccctgacctctacgctgccagcgtagcgctctcccagctgagctatggccccgtgctgtaacgtcatgttttattatagacgactcttctatgaatttcaagcagaaaattcagtttgctcatattttcctgagacgtttttcgaacataaaaagaagaccctccgggggcctcttcgtttatcgcacgagcatgattaaaatgatgccgaggatgacacggtaaatggcgaacgggacaagcttaatccggttaatgagccgaagaaaaaacttgacgactaagagggcgacgacaaaggcgcagataaagccgacaagaaaaaacggaatcatgtcataagaaagactgctccagtatttcaccagcttcagaaggcttgcgcccgccataatcggaatcgccataataaatgtgaagtctgcggctgcccggtgattcaagcccacaataacacctccggcaatcgttgagcctgatcgggaaaatccgggccataaggcgagacactggaataatccgacacagaaagcctgtttgtaggtgattctgtccaccgtatcgatcgtttctttccttttattgatccagtccgctataagcataagcacggctccggcaattaatccgtaagcgaccgttctgacggagaataaatagcggtcaatgaaatcctcaaataaaaagccgagcaccgccgctggaacaagaccgacggcgatttgcgcgatggtcagcctgtatcccttctgctgatcgcgcgtgacgttttttttgaggccgagtaaatgtaatatccgatccttaaacacaatggccaccgccagaatcgaaccgagctgaatcaccactttgaaggaattggcggcttccggattcatcaggcttccggatttcagccagatgtcatccgctatgatcatatgtcccgtggaagaaaccggcgcgtactccgtcagcccttccacgattcccaaaacggctgctgtgaacatctcccatagtgtcatcccattcttcccttcattcatcatttacaaaagagaagctctcctttgaaggaaagcctgtcttataataaatatcatgtccgttccgattttatgacttcgatacagcatcatttttttcttcttcatataaatgcgaacgcattttgaaccaatcaaacagatgggtcgtgaccactttgatgaccgcataccccgggatggctaaaataatgccgacaaccccgaacagctttccggcggttaaaagaacaaagatgatggtaatcgggtgaatgtgaagatttttccccatgatctgcggcgaaattaatttcccttccacgagctggacaacggtccagacaatcgcaagcttcagcagcataaagggcgaagtgaccaacgcgataataatcgccggcgtgatagcaatggtcggccctaaatacggaacaacgctcgtacaagcggcaatgaccgcaagcagtgacgcataatcaagtccgataatcagatagccgataaataataaaaacccgatgcagaagctgacgatgacctgtcctctgatataggagcttaatctgtggttcatttcactcagcatcgtatacgtttgttctttcagacgggtgggcacaaactttaagatatagatcggcagttttttgccgtctttcagcaaatagaacagaataaacggcacggtcacaattgaaataatcacttcagtcagcgcgccgataaaattcccgactccggtaaatgtgctgtttgcaattgtcgccgcctgcgccgatactttattggcaagatccgaaatgttgatattcatcgtcttttgcgcctgatttacaaaatcgcttccgatcaggcttttcgtctgatcttcaacgatgtccacatatttcggcaggttgtcgatcaggctcatgatctgttcctttaaaaacggaataattgaaacgaccgtaatcgaaatcagccctataataatgaggtaaaggagcaggatggaatagactcttttcactcttattttttccaatatatctacgatcggattaagcagataataaacaattcctgtcaaaatgacggggagcgcaatcgttttgagcaggacgataatgggtgtgaaaataaatgatgtcttcataaagacaaggatattgagaccgatgagcagcaatacaagcaaaaacaagacaaatttattgtctaagaaaaactgtttaaatctgccgccccatgtttgcaatgtttccactattgttcctccatcatatgtattttacttaaattgtacactatcgttcctgtaatgaaaaataataaccggtctctatgggaatttttcctatccgtttagctggcagccttttttccatttatgtttctttgaaaaaaagctataatgtaagccaatacatagaaggagcgatagcaatgattcgatttgcaacagtcggaacgaattggattacagaacgatttctggaggcggcttctgctattgatgattttcaattaacggcggtttattccagaactgaggaacgtgcggcggaattcgccggcaaacacggcgctgctcattatttcaccagcctgaaagaaatggcggaaagcaaagcctatgacgcggtgtatctcgccagcccgaatgcatttcacaaagagcaggcggtcctttttatggaacacggcaagcatgtactatgcgaaaaaccgtttgcgtctaacgcaagggaaacggatgaaatgattcacgcagccaaaacgaacggcgttctcttgatggaagccatgaaaacgacgttcctgccgaacttcagcatgcttcaaaaccacttacataaaatcggacccgtcaggagattcacggcaagctactgccaatattcatcacgatatgatgcatataaaaacggtacggtgcttaacgcgtttaagcctgaattatcgaacggttcgttaatggacatcggcgtgtactgcatttatccggccgtcgtcctgttcggcaaaccgaaaaacgtcattgcgaccggtcataaactagcatccggcgttgacggcgaaggcacggtcattctgtcatacgacggatttgaagcggtgctgatgcattcgaaaatctcaaattcgtttgccccggcggaaattcagggtgaagaaggcacgatcgttctggacagcattcacggaccggaacgggcggaaatccgctatcgtgacggccggacggaagacatttcagtccctgatctgaaaccttcgatgtactacgaaacggctgaattcatcaatcttcttcgaaacggacagcgggagtcttccgaaaatacatttgaacgttctttcattacggcaaacattatggaagaagcgagaaaacaaatcggaatcgtctttcccgccgatcaaaactaaaaacatccgcccggattcgggcggatgttttttatttggacgctaacaggtcagcaaacgcttttgcatactgcggaaggtcgggcgggcggcggcttgatacaatgtggccgtcagttacgacagcttcatccagccactttgcccctgcatttgtcatgtcgtctttgatgccgggcgtgctcgttactttttttcctgcgagaattccggcagatataagcacccagcccgcatggcagatctggccgatcggctttttctgctcgttcatcgtacggatgatgtccaaaacttcgggatatcttcgcagtttgtcaggagcccagccgccaggcacgagcacggcatcatactcctgaataatcaggctcttaaaatcgtaatccgccgtcgcgggcacgccgtattttcctttgtatgaacggcccgcttcttctcctattaaatgaacgatcgcgccttcctctctcagccgatagacgggataccaaagctctaagtcttcaaaatcgtcactgacaagcgctataacttttttgccttctaatctcatcactgccactcccttcttttatattagtgtatcgcttttttcagatgaggaaaagaaacagctcgttacagctgttcttcgtcttcagactgaatcgtaaatttccgtgtgacctgttgcagttcttcagccatatgcgcaagcgtttcggcggatgaactgatttcttccatggaggccagctgctcttcagctgaggcggcgatgtcttgaatgccggcggacccttctttggcgactgaggtaatgtcctccaccgcgtttgtcacattttgcgacccggctgcaagctgctcaagcgttccgttcatatgctgcaaggcgcctgaaatctgagtcgtcatctctgagatttttttgaagctttcggccgtttgatccgtaatatcgaggccttccttcacatcttgattcaccgcttggaatacggaaagcgatgtggcgatttctttgacgatttcctgaatcagcgtttcgatttcctttgcggagccggctgattgtacggcaagcttcctcacttcttccgcaacgacggagaagccccgcccgtattcgcctgctcttgccgcttcaatggccgcgtttaaggcaagcagatttgtttgatcggcaatgccgttaataacgttcagaatgctcttaatgtcgtgcgacttcgtttccagcccttttacgacggcttccgcctgctgtacggaacgatcaattgttttcatctggccgaccgttttcgccactaattcttctccgcttccggccgtttcagaggtttggatggcggattcagtgatttccgccgatacattcgccgtctcggcaatgcccgcattcatttgggaaaggtgatcagcactttcttccaatttctcgctttgtgattcgtttccgtttgagaattgttcaatcgccagagtaatatgctctgtcgccttgcttgtctgtccggcggatgccgtcagctcttcggatgaagaagcgacatgttcgacggatgattggatgacgccgatgacagaccggagtgatgccgacatctcattgaagctttggctgagctgcccgaattcattttttgacttgatgtcaatgacttccgttaaatcgccgtcactgattttatctgatgtcgagacaagttttttgagcggttttgcaatcgagcgaatgataaagaagattaaaataccgccgacgataagagaaaccgccaggatgatcagcgccattttcatgacaggcgaggctgcgtcatggatctcactgacaaaaaatgtgccggcgattttccagcccgtcagtttgtttgtcgtgaaagccattttcttctgctgtccttcaaacatgtattcaaacgatccgcttgatttggaaaatacttctttcgtccactctccggagccttccgttcccgcttttatagtcggatgggcgatgtattttttatcccccgttgtaatgaaggcaaatcctttatgaccgatctggacgcgttcggaagcgttcagcaggtcgcccagattaatatcaagcgccacaacgcctgatccgtcttttgtctgctgggcaatcgtaacgaccgtctgtccggttgcagcgtctttataaggctcggtaaacaccggctgtccgcttttttcaaccgcctttgtataccactcgcgcgtgagcggattataatcggacggcatgtcagcggacggatatttcacaaacgctttgtcgcgagacgcggcgtaaattgacgcgacatcgccatttacggtgacatactgcttcatattgtcgagcagtaccgatttatttttcgtgttcagtttttcctttgtgattgattcgctgtagtagtcaatcgctttcagcttaccctcaagcatgttttccagcacgctgttcagttcactgacatttccctgggcgctgtgggtcagttcgctttctaatgtactccccgccgtttggtagctgaagtaggcgagtatgccgaccggaagcaccaatacggctaaaaatgccgcgatcagcggcttgctgatggatggctgtttgatccaatgtatcagttgtttcattttttcagtctccttctttgaaaagctaaatctaatatcgtcagataggacaaaagatttattaaaaaaactaaaaaaaacacccaaacagcacatttgggtgttctatgatctattaatctattttaaatcgtttcgtcatatcacgtaattcttccgccatttgggataacgtttccgaagacgaactgatttcttccattgaagccagctgttcttcggcagaggccgcgatatcctgaatgctggcggagctttcttttgcgatggacgcgatttgctcagaagctcctgaaatctgctgtgatcctgctgtcagctgttctaccgtcgcattcatattttgaatttctccggcgatctggttcgtcatttcagaaatccgtttgaagctcgtttcggtctgattcgtaatatccagtccgctctccacctctttgttgacggattggaacatgccgagagatgtattgatttcgttgacgatttctataattaagctttcgatttctttcgctgaatcggcagactggaccgcaagttttctgacctcttcggcgacgactgagaagccccggccgtattcacccgcacgcgcggcttcaattgccgcgttcagcgcaagaaggtttgtctgatcagcgattccgttaatgacaccgagaatgtttgtaatgtcttttgattttgtttcaagtccgcgcaccacttgttcagcttctttcactgaccggtcaatgacgttcatttggccgaccgtctggtggacgagctttccgcctgaattggcgacttccgctgatgtggcggaggattcggtaatgacggcagatgctttcgccatatctttaagcccgctgttcatttgataaatatgttccgccgcgctttcgatattttcactttggctttcatttccgttagaaaattgttcgatcgccagtgtgatatgttccgttgccttgcttgtctgctccgctgaagccgtcagctcttctgaggaagatgcgacgttattcacggaatcctgaatggcatggatgagagacctgagtgaagcggccatattgttaaagcttttgcccagctcgcctaattcatcttttgactgaatttcgatcgtttctgttaagtcgccttcactgatctgtttcgatgatgtcacaagctgcttgagcggttttgtgattgaacggataatcagcaccatgacgatggttccgatgacaatcgctaatacgagaacgagcagggacagatgaaggatcggcagggccgcttcatgaatttcgtccagatacatcgttccggtaatcttccagcctgtcagcccgttcgtatcataagccattttcttttcctggccgtcgtatttgtattgaaaatcaccttttttgctggtgaacaactgttcagcccactccccgtttaatactgtgcctgacgcacggttcgggtgggcgaccacttttttgtctttcgtcaggataaaagcgtagcctgattttccgatgttcactttctttgtcgttttcagaagctcatcgattttcatattgatggcgacgacccctgagccgtctttcgtctgctgaacgaccgtcacgaccatcgtattggtggaagccgtgcggtaaggatctgttacaacaactttccccttattttccacggcctttttataccagtctctttcaagcggattatatcctttaggcatctgcagatccggataccgtgtgaaatgtccttccgtgtcactcgtatagatggattccacgtctttattaatcttcatgtactctgtgaatttatcggtaatttgcgattggtttttcggcttgtaccgatcctttgtgagccagtcgctgaaatatgccgttccgtcttccttttggctgatgcttgtgttgatcatatcgttaatctgctgcacattatctaatgcgcttcccatcatctgcctgtcaagcgtacttaccgccgattgataggcgataaaagccagcgttgaaataggaagaatgagaatggccaaaaaagaaatgagcagttttcttgtaagcgatctctgcttgatgatttgcacaatttttttcatctgctatatctcctcttgcgtgtttacccttcatatcggcaattatgggtaaatatacacatccaaaaagaagaaatataacgaaacatactttttacctattgcaaaattagtcttttagacttaattaagagtttatcttaaaacgctttgtcagttcgcgtaattcttccgccattttttccagcgtgacggctgaggaactgatctcctccatggacgcaagctgctcttcagctgaagccgcgatgtcctgaatgccggccgcgctttgtctggagactgccgcgatatcctctgaagcgtttgatacttcctgagatccggcagaaagctgttccacggttgcattcatattttgcagttcaccggcaatctgacttgttttagcggaaatgtcccggaagcttttttccgtttcgtccgttaactgaagtccgcttttcacctcgtgattgacggattccagcattccgagcgaagtatgaatttctttgacgatttcatgaattaaggattcgatttctttcgctgaatcggcggattggacggcaagctttctcacttcttcggcaacaactgaaaaaccgcgtccgtattctcccgctcttgccgcttcaatggctgcatttaaagcaaggagattcgtttgatcggcaatgccgttaatgacgcgcaaaatgctggtgatgtcctgcgatttgagttcaagcccttgtacgacttgctccgctttacttacggattggtcaatggcgcccatctggccggctgttttcttgacaagccgctcaccggcgccggatatctccgccgattcaattgaagtttccgtcacaacggctgccgcttccgccagatcgctgagcccgtctttcatctcattcacttgtgctgtcgctttatcaatactctcactttggtcttccgttccattagaaaactgttcaatcgcaagggtgatatgttccgttgctttgctcgtctgctcagccgaagccgtcagctcctctgaggaagaagcgacatgttcaacagagtcctgaattccctgaataagcgaacggagtgaatctgtcatatgattaaaacttttaccgagcacgccgagctcatcttgagagctgacatcaatggtttcagtcagatctccgctgctgattttttccgctgaagctacgagacgttttaacggtttggtaattgagcggatgacaaaataaatgaaaatcatccctgcggcaacggctatcgccaatatgataacggccagagtcagaaccggtcttgccgcatccttgatttcatccacggacatggttccgctgatcttccagcccgtcgcttcattggtcacgtacgccatttttttcgctttcccgttcagcgtatattcatagtcgcctttttgcccgctgtataatgtatcaacccattttcccgataccgccgcgccggctttttcatcactgtaggcaacggcttttttatttttgctgaggataaaggcgtatccttcttttccgatgttcacttcttttgtcatcgtgatgagatcgtcgatttttatatcaatggcgacgacgcctgatccgtcttgcgccgcgcgggccatggtgacgaccatctttttgtttgagatggactcataagggtccgtgatgatggtttggcctttattctccatggcttcctgataccagcttctttcaagcggattgaaatcggccggcatatcggcatgcggataacgggtaaacgttccttccttgctgcttgaaaatatggcggacgctttatcattgctttcaataaactgtttaaacctttcttgcatttccgtttggtttttttctttaaatttagcgcttgtcgcccattcgctgaaatatgcagagctttttgtaaacattccgatccggtcatcaatcatattgtttaagatttgcacatttccttcggcgctttccatcatttgcttttcaacggatgaagccgccgaacggtaggcgccggcggccaatactgctaccggaataattaagatcagtaaaaatgaaatgataagttttttggctattgattttctggcgattttttttgctgtttttttcaattttgtaaacctctttcaatcatttactgtttatatcggccgactccctttttattacattgaaaattaagtcataaatgaaaaatagttctatgtactccctttgtatgcaagactttttatttaattatccggctgtcactataaaaaaggacgccttccacctggaaagcgtccttttttactagttgattttaaattgtttcgttaattcccgcagttcttcggccatttgcgccaaagtatcggcggatgtgctgatttcttccattgatgcaagctgttcttctgcggatgcggcaatatcctgaatgcttgctgcgctttcccgtgatacgtccgcaatatcggtcactgcggctgaaacgtgctgagagctgtctgacagctgttcaaccgtgccgttcattgattgcagtttttcggcgatgtcgttcgtcatgccgaagatattctggaagctttctttcgtgcgatccgttacggcaagtcctgattgcacttcttcattaacggatgtaaacatgtgaagcgaagtattaatttcagccgtgatttcctgaatgagtttttcaatctctttggcagaaccggcggattggacggcaagctttctcacttcttcggctactactgagaagccccgcccgtattcaccggctcttgccgcttcaatggctgcatttaatgcaagcaggtttgtctgatcggcaataccgttgatgactcttaaaatatgagtaatgtcttttgatttggcctcaaggccttttacaaccgcttccgcctgctggaccgattgattgatgagattcatctgcccgacggtttgctgcacatattcttccccggtgccggcagcttccttcgattgtttagatgcctccgtaatggatgatgatgtgcgggaaacggcggcgagtccgtcatttatatgattcagcttggctgagcttgaatcgactttttcgctttgctcttcgttcccgtttgaaaactgctcaatcgccattgtaatatgttccgtcgctttgcttgtctgagaagctgaagcggtcagctcttccgatgacgcggccacgttatcgacagagttttggatcgcgctgatcagtccgcgcaaagattctcccatttcattaaagctcgcgccgagttcgcccaattcatctttcgagcggatgtcaatggtttcagtcaagtctccgccgctgatttgtttagaagagcggacaagccgtttcagcggtgacgtaatggatctgacaatcaacagaattaaaattcccccgatgataatagatgctgcaaggacaatcatccccatcgtcagcaccggttgtgaggcatctttaatttcgttgagctccatgctcccctctattttccacccggtcagtttatttgtcgtaaacgccatttttttattttgatcatcgagcttgtatgaaataatgccgctgtctttgctgtatacctcattcagccacggcgttgaaactttatcgcccggtttgtggtctttatgcgcgacataggttttatttttggacgtgataaacacgaatcctttttgcccgattttgattccctgcatctgcttcagcagctggtcaatcgtaatatccatggccactacgcctgttccgtcctgcatctgctttgccacggtaatgaccatgctgccgtcgcttgccgcggtgtaagggtcggtgacaacgagcgtgccgccggccttcacagcgtctttataccaagtgcgtgttctcggatcgtaatcggccggagtattttccttcggcgcctgtgcgtagctgccgtcttccgttcctccgtaaatgcgggctacgtccttatgaatagacgtgtattgcccgaacttttcttcaagagcagacatgtttttctttgagaaggatgatccttttaacgtttcactgaaaaattcaatcgcctttgcttttgcgccgatatcatttgtaatcgttgtgttaaaagattcgatgttatttttcgcgttgcctgaaatctgatcatccagcgaattgctcgccgtatggtatgaactgaattctaacacgagaatcggtatgattaagatcacgataaatgaaatgattaatttccgtgaaatcgatgcctttgtgcaccaattaatgaattttttcatattaagctgctccctcaagtgtgataccttatatatcggctcagtcttcacattttgttaacatttcctccttttttatcacttgattttcattgcccaagcttcctgcatatcttataaaaaaagatagggggcgcgcagatgattatcatatccggccaagtgcttcggcctcaggacatcgcgaactggcagacggaagaaagccttgttccgtatataaatgaactgctcaattctcccgtacaattcgattacgggtcgattgctgaactgatgttcgaggtgcggctgcgccgccatattgtggaagccgcaagagaactgcacggatcaggtgtgaaatttgcaactttcgccaaaacatacggaaatacggcttattggagactgacgccggaaggagccctggagctgaagtacaggattcccgcttcaaaagcgattcgggatattattgaaaacggggcgttttacgcatttgaatgcgctaccgccattgttgtgatttattatctggccgtcttaaagacaatcggtgaagaacggtttaaccggcgtttccgggatatcactttgtatgactggcactatgagcatctgccgatctacacggaaaccggcagccactttttacggggagactgtttatattttaaaaatcctgattttaaccctgcaaaggctcagtggcggggagaaaatgtcattgtgatggggaatgatcaatatttcgcccacggtctcgggattctgaccgctgaacaaatcatccagagattgaattctttaagaaaaaaaaatgccgtgcagccggcttatctgcttaaccaggcaacaaggcttgatgcacccgcgctttatcagatcatgcattaaaacaatcccatcgtctgtcattgtgacgatgggatgtgaaatgcttttcttttccggtaaaaagccgtcgtgccgagcgcttggtttgcagcccattcaaacttctctaaatcatggcgggtgacggctctgtcccgtctgctccatttaatggcgcggacaaagtaataccctttaatcggcgccatggtgactttggaatgcggaaaatcttcaaagacaaactcaatagtccctctttttttataggacatttgaagaatcttcatcatccatcacctcacgatttctggattatgattcgcacaatctgtccaaaacggttttcacgtctgtcggcccctcaagtttcgcggcggactggccggcccataaagacatatgctccgcgtctcctgattgagccgcgtgcccgcgcatcggctttgtcagcgtattatgcagcggataaggcagcgtttttccctcgtcagcttcatatgttttcatgaactgattcacgattccccgcgcctgttttcctgaaaacagggtggtcagccgcgtatcggctccttttgattcggcaatggctttttgatatgccggtgaggcgctgctttcttcacaaaggagaaacggtgttcctacttgaacgccgtccgcacccaaacatcgggccgcctgcaccccgcggcggtcaaaaatgccgcctgccgcaatcaccgggatattcagcgtgtctttagcctgcggaatcagcgccataaggccgagagccggttctcctttaaccggcagaaacgacccgcgatgcccgccggcttctattccctgaaggataacggcgtccattccccgttcttcaaaagccttcgcttcctccggcgttgtcgccgtgccgaaaaggaaacaaccgcttttcttcagcttttccgccgttttttccggcggcaggccgaaggtgaatgaacacgctttgactccgtaacggatcagaagctccgctttttccgcgaaatcattccattcttctttcagatcagagaacggcttggcgtcttttgccctcggaatgcgggctttccatttttcaacaagttccgcctcaggcatctgtctttcttccgggacgaaaagatttacttgaaaggagcggtccgtcagctctttcatctcgataagctgtttttcaagcgcttgcgggctgacgtatcctgaagcgaggcttccgagcgccccttcatttgataccgccgaagccagacgcggcgtgaccagtccgccggccatcggggcctgaatgacgggctttgttaatgataacggactcatccactcactcatttgttttcctccgtttcagccagtattttgatataacatgttctgtttcgcggaccgtcaaattcgcaaaaataaacgccctgccatgttccgagtatcaggcgcccgtcttctatgatgacatgctgagaggcgccggttgtactcgctttcatatgtgccgccgtatttccctccatatgccggtccagttcgtgctcccacggatacatttcatcaaaccttctgagcatatccctcttcacatccgggtcggcattttcattgatggtaatgccggcggtggtatggggacagtatatgagcgccaaaccgtttcttacgcctgtttcgcggagaaacgattcggcttcatgtgtgatgtcgatcatttcatcccttttgtttgtttgaatctgcaattttttcagcatatgaatgcctcctttctttttctcttcctttcccatattcgtttctgtatttgtcttttcctgtcggatcgcgatgataaacacagatcacaaaaaacttcagcctcgggactgaagtttttcaccatatatatacgcgggcctcataaggctttaagaggaaggatgtcacatggcggtgcgattctgtttccacgtttgcaagcacgagagaatcggagtcaagcggataaccgggatgcctgtataaagcgggggttcgggacagattggtgatgatcagggcggtttttgttccgttttttcttagataggcataaatctgccggtcattcggaagcagcaattcatatgtgccgctgatcaatacgccgtgtttttttctgagggcgagcagccgtttgtagaaatggtatacggatgtttcatcctgcaattgtgatgcagcgttcagccatgtgtggttcggattcactccgagccacggagaagcatcagaaaacccgccgttcgcctcaccgctccattgcatcggtgtccgtgaattatcccggcccttcttccagatgatcttcatcacttgttcatgcggaacgccgcgggacgtctctttttcatacagatatttaattgcggcgtcatcataatcttcaatggatgggaacgaaacattggtcatgccgagctcctgtccctggtaaataaacggcgtgcctttcatcagcatatacatcacggcgagtgccttggcgctttctgtcaaaaaccgttcgtcaccccataccgaaacggaacggggctggtcgtgattttccataaataacgcattccagccctttccttcaaggctgtactgccagccggacaagacgcgcttaagcgccggaatggagatgctttgatcatcttccgtatcccagaggccgagatgttcaaattgaaaaatcatttgaaagacgccgttttcttcaccggcccaatcagccgcctcccaagccgccactccgttcgcctcgccgaccgtcatgatcggatagcgcgaaaatgtttcccgcttcagctcttttaagagatccattatgccttccccattcatatgatacgggaaagacgggacgtacgggagaccgtccgggttcggcatgtcagggagcccttcttttttcttaatgtgagaaatggcatccacccggaagccgtctatgcctttatcaagccaccagcgaaccatctcataaacggactgcctcatcgcttcgttttcccaatttaaatcaggctgttttttgtcaaacaggtgcaggtaatactggccggtctcttgatcatattcccacgccgatccgccgaaaatgctttcccaattattcggctctttgccgttttttccgtctctccagatgtaccagtcccgtttttcggaatctttcgctgagcgtgattcgataaaccaagggtgctcatcgcttgtatggttaatgacgaggtctataatcagcttcatgccgagcgcatggacatccgcaaggagccggtcaaaatccttcatcgtcccgaattcgccggcaatttgtttataattccgaatatcgtagccgttgtccgcgcccggcgagtcaaaaacgggacaaagccagatcacatccgcccccaactcttttatgtaatgaagctttgctctgatgccgttaatatcgccgattccgtccccgttcgaatccataaagcttcggggataaatttgatagacggccgccgttttccaccaatccgttttcataccgacactcctttctttacagcatatgaaggagcgggacgaagaagcattttttccataaaaaaagcctcattgcaaaagcaggaggctcagaaatcagtttttttaatctcaacgaagcggatatgatggtcttccgcttccagcaccttaaattcacacccttcggcatgaaacacatcaccatttttcagctccattttttgtgttaagagccagccggcaatcgtgtcaatgtcttcattttcgatggcgatatcaaggagatcattcacctcttctatgagcgccttgccgtccatcacataatggtgttcgccttttttgacgatgtggggcatttcatcctggtcatattcatcacggatttccccgacgatttcctccaatatgtcttcgacggtcacaagtcccgccgtgccgccgtattcgtcaacgagaatcgccatatgaatccgctccttctgcatgcggatcaaaagctcctgaacggggatgctttcaatgactctgatgaccggacgcatcatttcttttaattcaatggagcggccgagaaaatacgctttaaataaatccttattgttaataatgccgagaatgtgatctttgtcttccttaataaccggatatcgcgtataccgttcgttgatgatcaaatgtatggcttcatcaactgactgttcaagcgagatgacggcgatttcggtgcgcggcaccatgatttctctggcgacccggttatcgaattcaaatattttattgacgtaacggaattcagattgattgatttgaccttttttatagctttcggacaaaatcagccgcaattcttcttcactgaccacgacctcatgttctttcaccgaatgaaaaccgaacagcttgaccaaaaatccggctgagccgtttaacagcttaataaacggatacatcactttataaaacagaatgagcggtttcgccgtccacagactgacagcttcggctttttgaatggatatcgttttcggcgcaagctctccgatgacgacgtgcagatacgtgacggcgataaacgccgcaataaacgtgacgacgtgcgtaatagatgacggcattccgatcaggctgaaaacaggatgaagaagccgctgaatcgtcggttcaccgagccagccgagtccgagcgccgtaatcgtaatgccgagctggcacgctgataaatattcatcgagatttgaaatcaccctgtgcgccgcgagcgcccggctgtctccggtttcaaccagctccgcgatttttgaaccgcggattttgacaatcgcaaattccgcagcgacaaagatggccgttaatccgattaacagcataatgagaatcagttttaatataagcaaaaaaacccctaccgcaaacggtaaggggccacctccttcgtgttaattctcatcacgaccatttaagaaaatcatcacaaaacgaagcagctcgaataatgaaacgagcgccgcagccacatacgtcagcgcggcggcgttcagcactttattcacgccgtgttcttcactgttgcgaatgaatccttccgacacgataatccgcttcgccctcgcgctggcattaaactcgacaggcagtgtgacaagctggaaaaaaacagcggccgaaaacaaaataatgccgagtccgattaagttcaagctgcccaggagcatcccgcccaagaaaagcagaggggcgaccccggaggcaaaattgacgaccggaaaaattttgtgcctcagcacaagcgcgccgtatgattcctgatgctgcaaagcatgtccgacttcatgggaagcgacggaaatggcggaaatggagcggccgtaatataccggctcagataaacgcaccacccgctccgtcgggtcgtaatggtctgttaaagtgcctcttaccggttctaccggcacatcatataaaccgttaatatcaagaatccgtcttgccgtttccgcccccgtccgctgactggaggcttccacgtctgagtatttctgaaaattgcttttcactttaaattgtgcccaaaacgacaaacccaatgcagcaattgttaaaaagataaacagcatattatcctcttcctttttctcttatatcgtacgatctgcttatatattattttaatgattgcccgctttcctgtacagaaatccgcttcttttttctgacaggaatcaatcctccgagcatgatgaggatacacccggccattccgatgtaaaacggaaacgtgcctgcggtctcttttgcaaaaacaagccatgaaaatccgccggacatgtgattgtatccattcaaatcgaaaataagcaatacggccgccgaagcaagcagctgcgctccggccagcgccgccaacagtttttgaatgaccgtcatttgactcaccctttttcggtccgctttctttatcatatgaaaaaataagggtgaatatgttttcggcgatttttgaaagacatcaaacgaactgggacatactgtataaaaaaagatacaggtgtgatcgacatgaaagtgacaaatggcgagaaagaacagctgagcaatgcgatagacagaatgaacgaagggcttgacgccttcatccagctctataatgaatcagaaaacgacgaacctctcattcagtttgaagatgagacggccgatttaatcagacatgcgcgtgactcatacggccaggaacagctggacgaaaaactaaacaccattattaagcagattttatccatctctctgtcgaaagaagagccggacgaatgaaatcaaaccgtatttttatttcctggctgagatggccgttatatgttcggatcgggctgatcattatcgccttgattttattgttcggccaactcatttacatgctcgaaccgaagcaattcacgtctgtgtttgaaggggtttggtgggcggtcattacggtggccacagtcggctacggcgattacgttccgcagacgccgctcgggcagattgccggcatggtgcttgtattaagcggagcgagttttgtgaccgcctatttcgccacgctttcttcagccgtgttcagcaaacagcaccgctatgtcgaagggaaggtcgcctttaaaggcaaggggcacgtcattcttatcggatggaacgaaaaatcgcatatgctgctgaaagagctgcagcacatcgcaccgtcaaaaactgtcgtcctgattgatgattcattaagggaaggtccgcttattgaaaacgtccatttcatccgcggacatgccgctgatgacagcacgctcaataaggcgaatattacggaagctgataccgtcattctgacagcggaccagcagaaaaatgaatccgaagctgatatgctgtcggtattaacgcttctcgccatcaaagggctgcatccgtctgtttattgtatcgtagaaattttaacggaacggtatgtcaaaaacgccgagcgcgcaggagccaataagattctgtgcacatcacacctgtcgagccgggtgatgtttgagcattaccgggtcaagctgcagcttgccaaaccgcaaacgctgtcagatctgacgctggagaaaaaggtgcgcatcattcccgtccccgaggaactaaagggctcatcttatcatgactgcgcgctctattatctcagacggaataccacgatcatcggcatacaaaaagaagaggggccgatgctgacccctcccctgtcataccaggtgctcgatactgatctgtttttggctctttaatgcagcaggacgtcttccagctctttcacaagcgagatgccgatatctgtatatgagcggtcaattgccgcatcccgccgtttcggttcggagaattggttgaataatgactcaaaaacaccgccgcctgctgcatcatccgtttcctgctgataaacgtgcctcagcaaaaagggtgtgccgattgtaacggcggccccccgttcatccaggtgtcccttatttgcttcaacagggatacggagaaataaatagccgtcctgatcggaaattttgtaatcaaagaacccgcggtcatactcccagccgcctccgatggtataaccgatcggtttcatcacctgttccagttcgcggagtaaaaacgattgaccttcaagtgaagatggtatgctgatcatgtgcatatgctcctttttgtctttagcgtccccgctctgcggtatcttcatacggcgtccgggaagaaccgggagcggcagacagacgctgaaaagaggtgacggcgcattcaatcagaacatacgtcacaattgcggagagagcggcttccgttgaaatatagaaaacggcggcatagagacagcacttcgtgatcagcgtatgcatccggccaatcttcagtttcagccggaccatgtccgtaaacaagccgagagggaaagcgaaaaacaggatggtttgcaagagggattcgggagacagttttagtgccgaatagacgatagcggcggaacagacggaaatgaagacatgcttacataaaagccgcatcaattcatcatcacacctttcacggtttaaaaaaggctgacccgtcatgctgagggccagcccttctttttatttttcaaggcgtttttcaagctctgcttttttctcttcaaagcccggtttgccgagaagcgcgaacatattcaccttataggcttcaacacccggctgatcaaacgggttgactccgagcagataaccgctcatcgccaccgctttttcaaagaaataaacgagatatccaaatgtatatgcgttaagctccggaatattgacaattaagttaggcacttttccgtctgtatgggcaagcatcgtgccttcgaacgcttttttgttgacgaaatcgaccgttttgccggctaaataatttaagccgtcgagatcattttccgcttcttcaattgtcagctcatgcttcggtttttcaacgtttaatacggtttcaaacagatcacgtctgccttcctgcacgtattgaccgagagagtgaaggtctgttgagaagttagcggaagaaggatagatgcctttttcgtcttttccttcactttcgccgaagagctgcttccaccattcagcaaagtattgcagcgcaggctcatagttgatgagcatttcaatggttctgcctttattatacagaacgttgcggacgacggcgtattggtaagccgcgttctcttctaattccgagctggaaaagtctttgcttgcatcaagagcgcctttcatcatttcatcgatatcagccccgcttaccgcaatcggcagaaggcctaccgcagtcagaacggagaaacgtccgccgacatcatcaggaataacgaatgattcgaagccttcttcattagaaagcgtttttaaagcgccgcgttctttatctgttgtcgcgtaaatccgcgctttcgcttcttcttttccgtatttttcttcaagaagtttgcggaaaatccggaaagcgattgcaggttccgtcgtcgtgcctgacttagaaatgacattgatagagaaatcagcgtcttccaaaagatccataacatctttcatataagttgagctgatattattgccgataaagataacttgagggtttttgcgcttatctttcggcagaacattatagaaagaatgattgagcgcttcaatcgccgcgcgggcgcctaagtatgaaccgccgatacccacgacgagaagcacgtcagaatctgatttgattttttcagcgctttttttaatgcgcgcgaattcttctttatcatagttttcagggaggtccacccagcctaaaaagtcgcttccggcgcctgttttttcatggatattatggtgtgccgtttttacgaaatcacgtgcgtatgtaagttcatgttcattgaaaaaaggtaacgctcttgagtaatcaaagcgtacatgcgtcatttgcttgtccctccatcacggtgaattgttttctctttcactttatatgaactcacccgctaaatcaagtcatgaagaaggcatgatgaatacgggatttgcgctgaagatgcgctcattttttatacaatatcccggattcgaaatagttatatttgtaataatcgtgaaagaggtaacgaatcgaatgttggtgatccaggaacgtatcacctttactttggagcaggttgacatccatcgccaataccgatgggacggttctttttatatagtactcctcttgagaggctgctaagcaggcatattaaggtataaatgtccatttttaaaaatagtgtctatatttgggttatcatgttaagatgaaaataattttaaaccgggaggtgattctttgactaaaaccattggtcttatttgtggaagtttacgaaaaaactcgtataatcgagtgattgctcaatcattgattgacttcgataatgcggctcaatttcgctgggttgaaatagacactcttcctttttttaacgaagatttagaaatggccggagcaccagactccgtaacatcctttagagctgatatacgagacgttgacggcgtcatcattgtaagtccagagtacaattccggaatcccggggtattaaaaaatgcattggactgggcatcgtgaccgcggacctcttccgttttaaacagaaaaccggttggcttaatcggcgcaacccccggagggttcggcacctcttttggtcaaatgcaaacgagagaagtactcgaagctatgcaagtcaatgttctgccctttcaaaaaatgctgatttcgcaagtccatgagaaaattgattccgctcaacacatacttacggatgaacaaacaaaacgttatcttcaacgctatttacaacagttcatccattggattgatcatgctccggttcccattccggattaattgaaagatcatcaccttcacgaaaagtcacttcagaaataactttctacctatacagtatatgaatagatttaccgttttccattgacaaactgacttgccttaattcaaggaggatgataaaatgtctgatctttattcccgtctttcaaaagatgattctgccgtgcttttagttgaccatcaaaccggccttatttccggtctcgtgcgtgactatggcgttgatgaatttaaaaacaatgtattggctctcggtgatacggctaaattctttgatttaccggttattttaacaaccagctttgaaaatggacccaacggaccgctcatgcaagaactcgttgatctctttcctgatgcgccaaaaatagcccgtcccggacaaattaatgcatgggacaatgaagactttgttaaagccattgaagcgaccggcaaaaaacagctgattatcgcgggggtggtaacagacgtctgcgttgcttttcctgcgctttctgccattaaagcaggctacgaagtgtttgttgtgacagatgcttcggggacgtttaataagcaagtagcagatgcatcattaacccgtatggctcatggcggcgtgcagcttatgaactggttcagcacagcatgcgagcttcagcgtgattggcgcaacgatgttgaaggttttggcgcattagtctccagtcatcttcccggttatcaaaacttaatgggaagctatatgggggcgcagcgggaccttagtacacaaaatgcataaaaaggagcgctgattgaatcagcgccccttttttaaattcgcggctcttcatcttcgtgatttagatttcgtgtaaatagatgacagacaatcgcaaagttaattggtcctttacggatgaaacgatttccatagttgtctcatggaaaagggtgtttcacttgctcctaatgaactaatagaaaatccggaaagagggactcccaaaacggttacatctgcagcttgaaaatcactccggccgggaatgtatcttacagtgacgcctttaagatggcaagtacatcatctttgttcagtttttggaaattgccgaatccgccgtattccatttcttttgcggcgatgtctgcgatcagctcaagcttgtcttcgccgatgtcataatccgcaaggcgggacggtgcgccgaggcttgtccagaacgcggacaatttatcgatcccttcaagcgcaatttctttatccgttttgccttcagtatcaatgtcaaacatattaagcatgaggtttttaaaacggtccacatttgtatcaagcgtgtatctcatccagttcgggaacagaatcgcaagtcctcccgcgtgagggatgtcataaaccgctgatacggcgtgctccatcgtatgggaagcccaatcgccgaaatagcccatttgcagcgtgccgtttaatgcgatcgtacccgcgtataaaatcgtttcgcggtgcttatagttctcaaggtcttccaaaagtttcggcgctgtttcaattaccgtctgaaggaccgcaaaacacattctgtcctgaagcggcgtgttttcaacattgtggaagtattgttcaaatacgtggctcatcatatccaccatgccgtatacggtttggttttccggaacgctgaaagtattctcgggatctaaaatggagaaacgcggatgagtgacattgctgccccatacgaatttttcgtttgtttcccaatttgtgataacggaatcagggttcatttcagagcctgtcgccgcaagcgtcagcaccgtgccgaacgggagcgcgtcctgcgccgttacttttttgctgtaaatgtcccatgcgtcgccgtcatatttcgcaccggccgcaatcgcttttgtacagtcgatgacacttccgccgccgactgcgagaaggaaatcaatctcatgctgtctgcacagctcaattcctttatttaccgtttccagacgcgggttcggttcaacgcccgcaagttcatgaacggctgcgccttcttcttttaaaatgcctgttacttggtcatacaggccgtttcgcttaatgctgccgcctccgtaaacaagcagcacgtttttcccgtattgcttcagctcttttttcaattggtcgatttgaccttttccgaaaatcagtttcgtcggattgcagtacgtaaagttctccatttatcatgacctccaaaaaaatcgtaagggaattactataacacagaaaaaaaggagctgccaatccggccgcccccctttatgttattacaatgatgctttcagtatcgcaagcacatcttctttctgcagtgacttgaactgtccgaatgctccgtttgccatcgctttatctgcaatcgtatccagcttctcatcagaaatatcgtaatcagcgagtctgttcggagcgccgaggctcgtccagaattcagacagcctgctgattccttcaagtgcgatctcttcatctgatttgcctgtctcgtcaatatcgaaaacacggacggcaagctgtttaaagcgggccggattttctttgagcacatgtctcatccagttcgggaacagaatcgctaaacctccggcgtgcggtatatcgtataccgctgataccgcatgctcgatgttgtgtgtggcccaatcccctcttgcgcccattgacagcattccgtttaatgcgatcgtgcctgtatataaaatcgtctcacgaagctcatagttctccagatcgttgatcagcttcggcgctgtttcaatcaccgtgcgcagaagcgattcacacatccggtcctgatacggcgtgtttgacgtgtggtggaaatattgttcaaacacatggctcatcatatcgaccatgccgtaaatggtgtggtctttcggaacggtaaatgtgtttaccggatcgagaatagagaatttagggtaaacgagcgggctcccccatccgtatttctcttgtgtctcccagtttgtgatgactgatccggagttcatctctgaaccggtcgccgcaagtgtcagcactgttccgaacggcagcgcttctttcggctggtgttttttcgtgacgatatcccacgcgtcgccgtcatatttagcgcccgccgcgatggctttcgtgcagtcaatgacacttccgccgccgacggccaataagaaatcgatgctgttttctttacagatcgcaacacctttgttcaccgttgagacacgcggattcggctctacgcctgccaattcatgtacggtaactcctgcttttttcagcaggtcggttacttgatcataaagaccgctgcgcttaatgctgccgcctccgtatacgagcagtacgttctttccgtacggcttgatttcttcaggaagtttttcgacctctccctttccgaaaatcaatttggtcggattccaatatgtaaagttttgcatgacatctcctcctttggatttatattatgcagaaagttgacgttcaatgtaaagcaatccgcttttttgacggcacatcacacggtttacagacagcggtttcccgggaaaggcacttgtacagcttgagacagtgtgtgatttacacggcggagaatgtagtatgcatagattctttgctttgtcacaatctataactgtttcacgaatttatagaggaggttgtttacatgagtgttattcagcgtatctgtctcgtattaacgattatcggcgctattaactggggactgatcggatttttccaatttgatttagtagcagccatcttcggcggccaaggatcagctctgtcgcggattatttacggtcttgtcggcatcgccggtctgatcaatctcggcctgctgtttaagccgaacgaagaaacatcccgcgaggaagcggcaaatccggaagtcagataaacataaaaaaagcaccgaacatacatatccggtgctttttttgatggttattttttgataaggtctttgcggttggactgttcaatccactcttcaagcttatctttcaatgtgttgaaaccttgcggagcagatgtttcttcagaaacttgtgccgctttcggttttcttggtttgctttcttttctttcaggcgccgcttgagtcgcacggatagaaaggctgattttgcctttttcttcgtcaactgcaagtacttttacttgtacttcgtcaccgatagaaaggtgttcattaatgtcttttacgaaaccgtgagtgacttcagaaatgtgaacaagtccttgagtttcttcatctaatgcaacaaacgcaccatacgcttgtaatcctgttactttaccagtgtaaacactgcccacttcaaattttgctgccattcataacaactcctaagttaaattaaatacagattatacgcaatttaaaattatatcatacaagtttgtttttcgcaaagagaacttttttacatcatcatgtttaagcgcagataaagggggtatactatgattacgaaggctttctagtattccccccttttatttggatgcgaaccgggttcgtatctttttttatgcccttttttcaacaaaccgtttgattctgacgagcgcttcctgaatctgctcaatggatgtcgcataggaacatctgatgtagccttcgccgctcgggccgaatacattccccggaacgacggctactttttcttcaatgagcagctgttccgcgaattcttctgaactcatgccggtcgactgaatggaaggaaaggcgtaaaacgctccgccggggtggtggcagccgagtccgatttcgttcaatgtttccacaatcaggtttcggcgtctccggtagctttttttcattctttcgacgtcttcctgaccgtttttcagcccttcaagcgccgcgtactgagccatggaaggcgcgcacatcatcgcgtgctgatgaattttgagcatggcatccctgatcacgggaggcgccgccgtaaacccgagtctccaccccgtcatggcaaacgctttggagaaacctgaaatcaaaatcgtgcgttccttcatgccgcggatggctcccatgctcgtgaatggctcatcatacgtcagctcggcataaatttcatcggcaagcacgatcaagtcatgtttttcagcgaaggaagcgatggattcaagctcttctttcgaatagacggaaccagtcggatttgacggcgagcatagaagcagcgcttttgttttgtccgtcagggccgcttcaaaatcggctgctgatgctttgaaaccttttgcagctacagtctgaatcggcaccggcttcgcccccgtcagggtcacgagtgattcatatgcgacaaaacacggttcgggaattaacatttcctctccgggattcataatggcgcggacagcgagatcaagcgcctggcttgcccctaccgtaacaatcagttcactgtcaggcgaataactcaggccgaaccgctgatctaaatagcggctgatttcttctctcagttcataaagacccgcatttgccgtataagccgtataaccctgttctaaagaaagaatactcgcttccctcacgttccaggccgtcacaaagtcaggctctcccactcccagtgaaatgacgccttccatcgtagcagccagatcaaagaatttgcggatgcctgacggtttaatctgctgcacgtagtcagataaataagaagtcttcgtttccatttacggagacaccacgattcttttgtcatcgtctccgctttcaaagactttgccgtcatgcttatattttttcaggataaagtgcgtcgtcgtggaaacgacggactcaagggtggacaatttttcagacacgaagcttgccacgtctgacatcgtgttgccgcgaataacgacagataagtcatacacccctgacatcaggtacactgattcaacttcctggaatctgtatatccgttcagcgacttcatcaaagccgacatttcgtttcggagtgacttttacgtcaatcatcgccgtgacgccttccaaaccgtcgactttgcgccagtcgatcatcgccgcataatcaatgatgactttttccttttcaagcttttcaatgatgcttttgacttcttcggcgggaatgttcgccattttcgcgatcgtttccgcatcaacgcggctgttttcgtctaaaatttctaatatttctgtttctttttccgtcagcttcatacgtttcacacctttgcattatcaaaaatcttcatgacattatatcacgattttcgacaaatgctaagaaaaacccgaaagaaaccagaactaaaatctgacaatcaaaaaagcctttacattacaacaaagaaaggacggcgaaggctctcatggaagctgtttcaccgattaaacgggccgcgatagacggagttgaactgtattacgagcattatgaaaatcccggcagacagacactcgtctgcgtacacggttttttatcttcggcattcagcttcagaaaactgatcccgctgctcagaaaccattatgatattatcgccgttgacctgcctcctttcgggcaatcggaaaagtcacggactttcgtatatacttacgcaaacctcgccaagcttctgatcggacttctggaaaagctcggtatcagccgggccgcactcatcggccattcgatgggcggccagatttccttatccgcgtctcttctcagacccgagcttttttctaaaatcgtcctgctgtgcagctcggggtatttaaagcgctcgcacccgtcgattatattcgggacgcacctcccttgttttgacctgtatcttaagtattggctttcaaaagacggtgtgctgaaaaacctgttaaatgtcgttcacgaccggacgcttatcgatcaggaaatgattgacggttacgaaaaaccatttacagaccgccagattttcaaagcgatgacaaggttcatcagacacagggagggcgatttagagcccgaggatttgaagaaagtgcaaaaccccgctcttttaatatggggagaagaagaccgggtcgttccggtctcagtcggaaaacggcttcatgacgacctgccggattccattctgtattcactcaaggatacgggacacctcgtacccgaagagcgcccggagtttgtttcggaacggatttttgaatttattcaataaaaaaaaccggcggaaccgccggtttttaaggggtgcaggagctgctttcttttatgaacagaagctgctcggcggccttttggcagccttcgatcggtagcttttgctcaaatgaagcttcaaagatatcctgaatggctgctgccagcttgtcggcacggtcttcactgtagacggcctgaacgatgtcgacggcttctgtctcataaaaatcttctccatatttaaatgggtcccacttggcaatgattttcatcatttccatgaccgcttggctttcttccattttcatcaccgcttataataaagtttgcaaatctattttatcatagatacgctgtgcaaaataatgatactacaggagtgacatacatgaactttgatcttcgagaaaaccgtcttggcacacaatcggtgaaatgggacaaggcggaagcgttattcggcgtatcggatgcacttccgatgtgggttgccgatatggatttccgcgctcccgaagcggtcactgacgccttaaaagcccgccttgaccacggcatattcggttatacgtctcctgacgaaaacacaagagaagccgtcgcttcatggcttgagacacggcacggctaccggcccgatcccgcaagcatcacgttcagtcccggggttgtcacggcaatcagcatggcagtacaagcctttaccgaaccgggcgatccggtgttgattcaatcaccggtgtatacgcctttttatcagatgatcaaggaaaacaaacggcaggttttacataacccattacgggaagagaacggcgtctactgcatggattttgaggatcttgagaaaaagctgagcgattctgaggtcaagctgatgattctttgtaatccccacaatccgtccggcagagcgtggagccgggatgagcttatgcagctcggatcgctgtgcgccgctcataacgtcaccgtcgtttctgacgagatacattccgacttgatgctgtacggaaagccgcatacgccttttgcttctctgtctgaggagtttgcgcggatttccattacttgtgtcgcgccgagcaagacgtttaatattgccggcattcaggcatccgccattatcattcccgaccgttataagcgggcgaaattctccgccgcattgcatcagaacgggatttccagcctcaacacatttgcggttgcagcaatcgaagcggcttatacaaagggaggcccttggcttgacgcactgattccttacattgaaaggaatatgaaattggctgaggactttttaagaaaagaattgccgaaagtccgcatgatgaaacctgacgcttcctatttgatctggatggatttcagcggatacggattttcggatgccgagctcaaagaaagaatgctcaaaaaagggaaaatcatattagagccgggaacgaaatacggaccgggcggcgaaggatttatgagacttaatgtcggctgttcagccgccgccgtaaaagaagggcttaagagaatgaaagcagcgctctcttagcagcggaaagaacgcctttatcagatgagataagggcgttcgctttagagaaataaatactttttttgccggtaaagatgttataatagattcatatttacataggaaaggatttcgcataaatggagattgtaaaggattacctgcttcacttctcttttattttattccctatttttctctatcaagtcttctggctcagcaagcccgatttgcttgtgccgagagcgaaccgcctgctggtcgccgtatttgcagcgtcatcttccttattatgtacggcttttcccatccaggagcttcattccgtccgttacggtttgcagctgattcccattatcgtctgcctgctttattccggtaccgcagcaggacttgccgcaggggcagcatccgttttttttcagctcatatggtttgaaccttccgctctttttttcttatccttaattccttttttaatcatcatccctatccagctccaaacgaaatggccttttttctcaaagcggaagaaactgcttttcgctcttctcatcggctgcactgaaaccgccttattaaccgcatctgtcttcatctattccgcgaccaatattttcaattttcaaaatctatcttccgtttattatgaggcggcagtatccgttttttttcaagtcagcgcccttttgctgtgcatttatttgattgagatcattgatgagaatgcgtccatgcgggcaaggctgattcactcagaaaaaatggccgtcgtcagcgagcttgcggcaagcgtcgcccatgaagtccgcaatccgcttacggtcgtcagaggttttgtgcagctgctgttcagcggcgagcagcttcaggacaaatcccactccggatatcagaaacttgtgctgtccgaactcgaccgggctcagacgatcattacgaattatctcgatatggcgaagcaggatgactatgaaaaagaaaagtttgatatttctctgcttgtaaaggaaacaggttccttaatggagtcttatgctaattttaaatcggtgaccgtgactgttcaaagcgagcctgatttatatgtgttcggcgatgtaaaaaaactgaaacaggccttcattaatctgattaaaaacagtattgaagccgtgccctctgaaaacggccgaatcgaggtctccgtccaaaaacaggaagagatgattctcattcagattacggataacggaatcggcatgtccgatgaagaactgcagaaactcggcaaaccgtattatacgctgaaaacgaatggcaccgggctcgggcttaccgtgacattctcgattattcagcatcatgaaggctccgtctatttcaccagcggcgagcactcgggcacaacggcttcagtcaggcttccggcagctgttcactagccaatcgcgttgatcttttatagaataactagagagaggtgaacgctatgaattcgtttgaaatcggcacaatcgtaaaagggttttataaaacaggagcatacataggggaagtgacagacgtcaggcccaatcactatttagtgaaaattaaagccgttctgacgcatcccgctcaaggagatcttcatcatccgaagcaggcggatgttccgttctttcatgaaagaagagcgcttgcattcggggaacagacaaacataccgcatcagatggtcaaaccgtttgatggcgaagttcctgattatacggcttccttacaagcggcgtctgcccggctgaaagatcagcttacagcggacggctcagaatgggcggaacgttcgctcgccaacttggccgcgttagagcgtgactattttaaaagaacttgacccagtcggcatgattgggtttttttatgtggcccgtcgaaacagttcagtcagatcgacgcgatcaccgatcgtcgggggtttcggtttttcaagatattgtttatcccgctcgacaagcttgaataatttgtatgtcgtccgcgcatcatccagcgctttatgatgcgtgcccgtccctttatcgccatactcttccgccgctttccaaaggccggtcaatgttctgtcgccaaagaagtttttatattctagggacagatcccgaagttctcctttgaacggaaaagggatgtggttaaacatgcaattttgctttaacactttcatatccatattgccccaggtgacgatcgtgcagtttttatcaggatcaagctcatttaatttgcggatgaattcattaaacgtgattccgccgtccacgtctttttgggtgatgttcagaaaggttttgcatcgtttcgtcagctttggaaattttttcggtttgatataactcgaaaacgtttcagtcacttcatcattcaccgtcttgacaatccccgcttcaataatctcgggaaagaaattttgcgggctgtattttccgtcaggcatcgtaaattcaaaatcaataatgagcagactgcgctgatccacttttttacacctgcctttcctccgatcaaaaatgatattttatgatagtatatcagtttcccctctgaaactttcttcattttctaaaaataatgaattttcctatatccgcatcgaaaatacaaataccggattcattcctatatactaatgattagacacacgaaaattaaagaaggtgatgttatttctgtccgtaagaagaacttcgtcgtcatttggattacaaatttctttatttccgccagcatgaccatgattgttccgtttctttcgttatatatcgaaacgatcagcccccattcgggcgggtatgtgcagagatggagcgggtatgtgttcggcgtcacgtttttaatggcgtttgtgatttccccgttttggggcagattcggcgataagcgcggctacaaaaaaattctcttgatcacaggcaccggcattgccgtcagcattttattgatggggtttgtgacatccgtttatcagctgtttgtcctccggctgcttatgggccttgtaacgggctttgttccgacttcgcttgccatgatttcggcgcagacgccgaaagagactgccgggaaaacgctcggcacgctgcagatgggtcaggtgtcaggcactttattcggaccgatgctgggcgggctgctcgctgacagcttcggatttacgtacacattttttattacgtcttttgtcattttcgcatctgtgcttctcgttttatttcaggtgaatgagcagccgctcggcgagaaacaaaacaagcggaaaacctattccagaaaacaggtgctctcctatatttttcaccagcccgcgctttgggcgatgatggtgcttaccatgatcgtgcagaccggcaatttcagcatccagccgctgctcgctttatatgtcaatgagctgcacggacctgttaatttagcctttttctccggaatggcgttttcagcgaccggactcggaagcttattgcttgcccggaaatggggggacttcggcgaccgcttcggccacagccggatcttaatcgtgcttttgattgcatcagcggtgttttttattccgcaggcgctcgcctcctccctctccattctgttagtcttcagatttctgttcggcatggtcatgggcggcacgctcccctgcattacggccgcgatccgcgtcagggctccgggcagcatccagggagaggtgctcggatataacgtcagctttcgttttctcggaaacgtgctcggccctctgctcggaggtgcggtctcaagcggtttttctatttcggctgctttctacgtcaccgcctttctcttttttataggcgcggggcttttatggatggcgggacatctgcaaaaggatacagcgtcaaatgcgggctgaccggcagcgatcacgatttcttctaaatttaaccttctcgtattcttaaaagaatgatacgatatggctagaaatcaggagaaaagagagtgaccatggtacgtaaaataatcggatggattttgctgctcggcattatcccgttgtgtgcatttacagttattgcttccggcaaagaggtaaaacaaatcaagccttttgatcaggtgctcgataaacatattgatttaaaagcgatcaacctggttcaaaacagttacatgtatgacagggacggaagccttgtttctgagattgtcagcgatcatgagaaccgcgtgatcgtgccctttaataaaataccgaatgaggtaaaacagctgtttttaacctctgaagaccgccatttttatgagcataaagggtttgactttatggggatggtcagggcggccgcctccaatttcaaagatcataaaattgaccagggcgccagcaccatcacccagcagctggcaaggaatgtgtatttaagccatgaacgcaccttcagccgaaaactgacggagctggcctattcctatcagcttgagaaaaaatacagcaaagatgagattttagaaggctacttaaatacgatttattttaataacggtgtatacggtgtcggttcggcggcacaattttatttcagcaagccgctgaaatctctcactttgggagagatggcctttatctgcgccatccctaataaccctacattatatgatcctctcaagcattttgattatacgaaaaaacgacaagtcagattgcttaacggattgaaaaaagcaggcgttatatccgggaaacagctgaaaaaagccgaaaaggaaaagatcaagcttgatataaacgaaaaaacaaataaatatcctgactatgtttcctatgtaaatgatgaattcacacagcttgtttcctcatccgaaggctatgacaaacgtcttgaaaaagcttccggaaaggcgaaacaaaaaatacagagtgagctttccgacagagtcagcacattgttaaaagacggcgtgaagatttatacggcgctgaatccgtatatgcaaaaccaggtcgtcgcccaagtgaatcaaaatctgccgtatgcaggcgtccagggcggagcggccgtgattaatcatcagacacatcagattatcgcgctttcaggcgggaaagattatcataaatatgatttcaaccgcgcctatcaagcatacagacagcccggttcatccattaagccgctgcttgattacggaccttacattgaaaagaccggcgcaacgccacacagcaaaattgacgcaagcaaattctgcagtgcggattactgcccgcagaactataataaccgcacatacggcacggttacgctggaaacggcgtttaaatactcgtacaacacaccggccatcagaatcatggaccgcgtcggcgtcaataaggcgttcagctaccttgaaccgtttcatttcgcgaagctggtcagcgcggattaccgcctgcctgcggcgctgggcggttttacaaacggcatgacgccgcttgaaatgaccaatgcgtacaccacgttcggcaacaacggcgtttatacgccgagtcacgcgattacaaaagtgactgatttaaaaggaaaaacgatattaaaatggaaagatgagccggcgcaggtattcagcgtgcggaccaacatgcagatcaaagaaatgatgaaagccgtcgtcaaaagcggaacaggaaaaaaagcgaactttaaagctccgtacgtcggcggaaaatcaggaacgtcaaatgactatcacgatatgtggtttgtcggcctgacggacgcttatacgatgggggtatgggtcggcaaggatacaccgtcaagcgtcgaataccttcatgacgcaagccctcagctttcgatctggaaaaacacgctgcaggcagcttattaaagataacggaggggatccgctttgaaaccagctcagcttccggaccgcgtgcttttgtttgacggcgtctgcaacttatgcagcggcgccgttcaattcatcattaaacgcgatccggccggcaaaatctcatttgcttcattgcaatcagataccgcccgggagcttttggcatcagaaggacttccgacagaacaatttgacagcatgatttttatcgaaaacgggcggatatacaaaaaatccgcagccgtgttaaaggtttcgcgtcatctccgcggagcctggcggctgtcagcggtttttttcgcagtgccccgcccctcagggacagagcctattctttcatcgcccggcgccgttacaaatggttcggaaaaagggaagcatgcatgctcccctcccctgagatcaaaaacagatttctgtcttaacaaaaatggctagcttacacaggtaagctagccattatgctattataaagcttgataaagatgtacaaaataccgataacaaaagtaaaccaaaacagaatctcaagcaatataaaaccgatcagcgaaacgatcgagagtgtcgaatagattctgtacaccatgaaaatcaaataaatgagcgtaacaacggcaaataacgccgcaatccaaaaaccattctgcacgaacgcaaaggaaagaattcctccgcctacataaattaaagagcctaatctgatttttttcagattgtccccctcagggtcatttgtgaaaaacaaaagagacagctctgtcactgtgtttgcaatcagcttcaaagccgaaaaaagcataaaatacacaagggcgaacgctgcaaaaagcgccagtctgatccctttctcagagaaataatccagcatcccctgatacatgccgagcgtctgaagtatcttcatgacataaagcgaggtagaaatggataatgacgaactaaaaagcagaatcgcaacgagcggaaaataacccgtccaataagtatttttcatataaaaagtccctttctgtaatctacctcacttattatggaggacttaaaacacattgacaagataaaaaattccatttttcctcacttttacgaaataagggcctgatcttcacaaaccggctttttcggagtaaagtagaacgcgggaatgataaacgtaaggaaggctgttatgaaaaaaacattaaaattgcaaacccggttaacgatattcgtctgtattgtcgtccttatcgcactttgtatcacctttttcacgatcagcgtccagaccgcggaccgcgtgaaagaagaagaacggacaaccgcgctgcgcaccgcaaagcttgtcgcggaaacaccgagtgtcgcgcaggcattgcaaacaagaaaagggctgaaagagctccggaattatacactggatgtccagcatacgacaggaaccgaatttgtcgtggtgatggatatgaacagcatccgcctcacccaccccgacgcaaataaaatcgggaagaaattcaccggcggagacgaacagccggcgttgcacggccatatcaaaacgagcacatcagcgggaactctcggaaaatccatgagagccttcgtaccgatctatggaaaagataaaaaacaagtgggcgtcgtttcggtcggaatttcgcttaacaaaatacaggatgtcgtcagccacagtttgagaccgctttatttcatcatctgcgtaagtatttttgtcggcgtcatcggagccgtcattgtcgcccgcaccgtcaaaaacattatgtacggtcttgagccttatgaaatcgccaccctcctggaagagcggagcgccatgctcgaatcaacgaaggaaggcatccttgcggttgacgcgcggggaaaaattaagcttgccaatgcagaggcgaaacgactttttattaaaatgggtattccgactaatccggtcgatcaagatgtgaacgatattctcccgaaaagccggctgaaacaggtgattgaaacgaaaaaaccgcttcaggacagagatatccgcattaacggacttgagctggtctttaatgaagttccgattcatctgaaaggacaaaccgtcggagcgatcgccacgttcagggacaaaacggaggtcaaacatttagcagaacagctgtccggtgttaaaatgtatgcaaacgcattaagagcccagtctcacgaattcatgaataagcttcatgtcattttagggcttgtccagttaaaagaatacgatgatctcggcacttacattaaagacattgccattcagcagaagacggaaacaagcgagattataagtgatgtcaaaagtccggttctcgcagggtttcttctgggaaaacaaagctacatacgcgagcagggcgctgatctggacattcagctcggcagcctgattccgaatgcggcggatccggccgtcatccatgagctcattacgattatcggaaacctgttaaacaacgcgctcgacgcggtggcgcagatgccgaaaaaaaacattacgtgctcgatgcggtttcaggatcgccagcttgacatagagattacggacacgggagccggaatgtctgcggcagaccaagcccgtatttttgaacaaggttattccacgaaagggacaaaccgggggttcggcctctatttcacccagcaggcaacagaaaatttaaaaggccatatgattgtgacaagtgaaaagaatgaaggaacgactttcagtcttcgcattccgtatgaaccgaaggaggaaaatgatgattaatgtactcatagttgaagacgaccccatggtgggtgaattaaataagcgctatctcagccagattgaaggatttcagctgaaagggatcgcatcatcctttcaaagcgcgctgcacgtgctgagcgagcatcatatcgatctcatccttcttgacatttacatgccgggaaaaaacgggcttgagcttttaacggaaatccgcaagcagaatgaatcggttgatgtcatcgtcatttcggccgcaagcgagctggacgtcattaaaaaaacgcttcggtacggcgccgtcgattatttaatcaaaccatttgaatttgaccgctttcaaaccgctctttccgactacagacgcaagcagaaagtttatcaatcacacagaagcatgacacagaaagaattggatgccgagctttttcaaaagaaagaagcggcggaaaaggttcaccttccgaagggattgacaaagagcacgcttaaactcatctgggcgagcattgagtctttcggcgacggctcttttaccacggaagatctcgccaagcatactgaaatctcgcaagtctccatccggaaataccttaaatttctggaagacatacaagtgctgaatgtagagatggcgtacggcacgatcggcagacccgtctttcaatatcatatcaacaccggcaatgtcagcagcatcaaacaatatttataatgtcaaaaagcgccgtttcgctgtgaacggtgcttttttactgtcatatcccgtgacaaaaggcttgagattcctttttgatatgctatataaggataatgacccggctgatcctcctctgttttaaccagatgaggaagccgattcataaaattgatattttttaaaaaataagcaaatttctatttatttatggcgggtaaaatgataaattatgattggttagcagatcttttcagataagtcataagtcccgaacccggaagagacagccgctcaaggcgggaaaaagagagacgtctcatcattattatcagaaagttttttcgattctgcatccggcacggggactcaagtctgaattgaacggcacagccatattttacaggggggttatatctttgaaaaaacgcaaaatcggaatggcgatggcgctcatcgcagcggccggaaccatattaagcgcatgcggttcaagtgacaaagcaaacggctccggcagcaaaaactttaccgtcggcatggtaacggatatcggcggtgttgatgacaaatcatttaaccagtccgcctgggaaggcatccaggcattcggaaaagacaacgggcttaaaaaaggcaaaagcggttttgactatcttcaatcaaaatcagatgcagattatacaacgaacttaaataaattagcgcgggaacactttgacctgatttacggcgtcgggtatctgatgcaggattccatcagcgaaatcgccgatcagcgcaaagacacacattttgcgatcattgacgccgttgtcaaaaaagacaacgtggcgagccttacatttaaggaacaggaaggttcattcctcgtgggagcggccgctgcgctatcgagcaaaacgggaaaagtcggattcgtgggcggaatggagtccgaattgatcaaaaaatttgaaatcggcttccgcgcgggtgtacaagccgcaaatccgaaagcgaccgtcgaagtgaaatatgcgggcgggtttgacaaagccgatgtcggcaaggcgacggctgaaagcatgtacaaatcaggcgttgacgtcatttatcacgcggccggcgcaacgggaacgggcgtcttcacagaagcgaaaaatctgaaaaaagaagatccgaagcggaacgtatgggttatcggtgtcgataaagaccagtacgcggaaggccaagtcaaaggaacaaaagacaatgtcactctcacatcaatggtcaaaaaagtggatactgccgtggaggacttaacgaaaaaagcgagtgacggtaaattcccgggcggcaaaacattaacatacggtttggcgcaagatgcagtcggcatctcggatcacaaggagaacctttctgacgatgtcatcaaagcaacagacgattggaagaagaaaatcgcggacggactcgtgatcccttcaactgaaaaagaattgaaatccttcaaggctgagtaagaaccaggggataaggagactttcgtgcttatcccctctcttttttgaaaagagcggtgaaggaaaagctgcatctcttgcagcttttcttttgccaagctctttctcatcaaagtatctctgaaaaggagcgacaaatcggtggattatatcattgaaatgcttaatatacgcaaggaatttcccggaatcgtcgccaatgatgacgtcacgcttcaagtgaaaaaaggcgaaatacacgcccttctcggtgaaaacggcgccggaaaatcgacactcatgaacgttttattcggcctgtatcagccggaaaaaggcgagatccgggtgcgtggcgaacgcgttcacatcaacagtccgaacaaagccaacgatctcggcatcgggatggtgcaccagcattttatgcttgtggataccttcaccgtctcagaaaatatcattctcggaaaagagccgaaaactttcggccgaattgacagacagcgcgccgcccgggacgtgcgtgatatttccgaccgttacggcctgcacattgatcctgaagccaaagttgccgatatctccgtcggtatgcagcagcgggcggaaatattaaagaccctctaccggggcgccgacattctcatttttgacgagccgaccgcggtgctgactccgcacgaaattcaagaactgattcagattatgaaaaatcttgtcaatgaaggaaaatcaattatcctcatcacccacaaattaaaagagattatggaagtctgcgaccgtgtcaccatcatccggaaaggaaaaggcattacaacacttgatgtcgcacatacggatcaagatgaactggcaagccttatggtcggacgcgaagtgtcattcaagacggataaacagccggctgaaccgaaacaagaagtgctttcgctttctgatgtaacggtgaaagacgcgcgcggcgttgaggcggtcaaacagctctccctctctgtcagagccggtgaaatcgtcggcattgcgggcgttgacggaaacggccagtctgaattaattgaagccattacaggtctcagaaaaacaaatgccggcacgatcatgttaaacggcaaacagctgcaaaatatgccgcccaggaaagtcactgaagccggaatcgggcatattccgcaggacagacataaacacgggctcgtccttgattttccgatcggagaaaatatcgtgctgcaaagttattaccaaaagccctactcttctttcggcatattaaataaacacacgatttatgacaaagcgcgaagcctgattgaagaatacgatgtcaggacacctgatgaatatacgcctgcgcgcgctctctccggggggaatcagcaaaaggccattatcggccgggaagtggacagaaatccggatcttttaattgcggcccagccgacgcggggactcgatgtcggcgcgattgaattcgtccataaaaagctcattgagcagcgtgacgccggtaaagcggtgcttctgttatcttttgaacttgatgaaataatgaatctcagcgatcgcatcgccgtcatctttgaaggcagcatcatcgcaaacgtcaatccgcttgaaacaaacgagcaggagctcggacttttaatggcgggaagtaagcaaatggaggcggggaaaacacatgattaatcgactttctcatctggctgtgccgctgattgcgatcatccttggattagctgcgggtgcggtcatcatgctcgccagcggctacaatgtcgtaagcgggtattcggctctttggagcggcattttcggtgaagtgtattacatcggggaatcgatccggcagattacgccatatattctgtccggattggccgtggcattcgcatttcggaccggcctgtttaatatcggggttgaaggacagctccttgtcggctggaccgccgcggtgtgggtcggcgtttcctttgacgcccccgcttacatccaccttccgctttcgttattggcggctgcggctgcgggcggcatttggggcctgattcccggatttttaaaagcccgtttttttgtccacgaagtgattgtcacgatcatgatgaattatatcgctcttcatttaaccaattatctcatttccgatgtcatgacggaccaccgggacaaaacagacaaaattcatgaaagcgcgtcgctccgctcgccgtttttagagcagctgacagattactcccgccttcattggggcattctgatcgctctgtttgcggcagtcctcatgtggtttatcattcataaaacaaaaagcggatttgaattccgggctgtcggctttaaccagcacgccgcacaatacgccggaatgagcgtcagaaaaaatatgatgtacgccatgatgatttccggggccttcgcagggcttgccggcgcgatggaaggactcggaacctttcaatatgcggcggttaagggcgcctttaccggcgtcggcttcgacggcattgcggttgcgcttctcggcggcagcacggcaatcggcgttgttctggcggcatgtcttctcggcggccttaaagtcggggcattaaatatgccgattgaatccggggtgccttctgaagtcgttgacatcgtcatcgccattattattttgtttgtggcatcaagctacgccatccgtctcatccttgataaattgaagaaaaagggggcgaagtaagtggacttcctgcagattttatccattattgttccggcaacactcgtatatgcggctccgcttattttaaccgctctcggcggcgtgttttctgaaagatcgggggttgtcaacatcggtcttgaaggactgatgattatcggcgcctttacaagcgtcatgttcaacttatttttcggacgcgagcttggcgccgccgctccgtggctcgctctggctgcggctatgattgccggcggactgttctcactgatccacgcggctgccgcggtttctttccgcgccgatcagacggtaaccggtgtggcgatcaatatgctcgcgttaggagcgacactgtttatcgtcaaactgatttacggaaaggcgcagactgataaaatcccggagcccttttacaaaacgaacattcccgggttaagcgatattccggttttaggaaagattttcttttcagacgtatattatacgtcgattttagccatcgtactggcctttgtttcctggtttattttattcaaaacgccgttcggccttcgcatccgttctgtcggggaacatccgatggcggccgatacgatgggaatcaacgtgttcggcatgcgctatatcggcgtcatgatcagcgggctgttcggcgggctcggcggcggtgtgtatgcttccacgatcgcgcttgatttcacgcactccaccatttccggacaaggctttatcgctctcgccgcgctggttttcggcaaatggcatccgatcggcgcgctcggggctgcgctgttcttcgggtttgcgcagagtttgagcattatcggctcgcttttgcccctgttcaaagacattccgaatgtatacatgctgatggctccttacattctgaccattctcgcgcttgccggcttcatcggccgcgcggatgcgcctaaagccaacggcatcccttatattaaaggaaaacgctgattgccacacaaaaagagttccgcaccctggtgccggaactcttttcatctatatacgattctgatatactcacgcggctgaaacggcgtttgcattgattcagccgcactcagcttgtcttctgcgtattccgcaccgagaaaaaaatgctcccaatcatctgcttccgtctgctgccgcgttttgcagaaatcatcaactatgaatgttcctgcaataatagaacaaaatattccaatacaggccgccgcctttctcttcatctgaccagctccttttgtaaagcttgatctgaaaaagaaatgtatatacaaagatccggatatttgataaatttattttgggttcaaaagaccacaaaaacacaaagaggaatacattatgccgtagcagggtaaaaaaaagtgcgatataatttgtactgggtcctatgaccgtgaattgattgattcattcttacataaagcagttgcttgatgaaaaaacaagcaaaggaggtcttctgttgcagctgttacatttcgcgattttggcgccttttttatttgcatttatcgttccctttctttataaacgggtaaaacaagtccatacaggctggtttgtgctgatagtgcccgttgtgctgtttgtttactttatcagcaagctccctgtcacaatggctggagaaaccgtccggtatgcggccgaatggattccgtccctcggtattaactataccgtttatattgacggactcgggctgttattcgctttattgattacgggcatcggctctttggtgacgctttacagtattttttacttatcgaaggacaaagaaaagctcggccctttttatgtgtacctgctgatgtttatgggcgcgatgctcggcgttgtgctcgtcgataacgtcatcgtgctttatatgttctgggagctgacaagcctgtcatccttcttattaattgggtattggcataagcggaagaaatcacgctacggggcggaaaaatcactgctgattaccgtcggcggcgggctgtgcatgctcggcggctttatcctgctgtatctgatgacggattctttcagtatcagggaaatggtcaaccaggtgcatattatcgcaggccacccgttctttattccggcgatggttctcctgttattgggggcctttacaaaatcagcgcagtttccgttttatatctggcttcctgatgccatggaggcgccgactcctgtcagcgcctatctgcactcggctacaatggtgaaagcgggtatttatctgattgccagattcagtccggtttttgctttttcacccgtctggttttggacggttgcctcagtcggtctgatcacgatggtatgggcttcctttaatgcgattaaacaaaccgatttaaaagcgattctggcattttccacagtcagtcagctcggtatgattgtatcgatgctcggcgcaggagccgccgcgcttcattatgagcattcagagtattttacggcggctgtcaccgcggctgtgtttcacttaattaaccatgctacttttaaaggaagtttatttatggcggccggcattatcgaccatgaaacgggaacgcgggatatccgcaggctcggcggcctgatggcgctcatgccggtaacgttcaccgtttcactgatcggaacgttttccatggccggtctccctccgtttaacggctttttaagtaaagaaatgttctttacaagtatgctgcggattgctcatgcagatattttcagcctggatacgtggggcgtgctgttccccgttctcgcatggatcgggagcgtcttcactttcatctacagcatgaagctgtttttcagaacgttcagcggcgcgcgcaaaacggatcagcttgaaaagacgccgcatgaagctccgctcggcatgctgatttcgccggtgattcttgccgcttgcgccgtcagtctgttttttgctccgaacgttttgtcttacagcctgattgaaccggcgatgaactccatttatcccgctctgttaaccggcggagatacattccatgtccatatttcccagtggcacggggtgacggctgaggtaatgatgaccctcggcatcatcattgtcggcacgatcggttacgtaacgctgtctaaatgggagcgtctgtacggtctgtttccgaaaaaactgacgctgaacaagctttacgatgcggtgacgggcagtatggaaaaaagatcttaccagctgacgtcatcttatatgaccggatttttgcgggattatctgctgtatatctttgcgtcgtttatcattctcatcggagcggcgttcgtcatgaaaggcggcttttccatgacagcgaaaggaatggctgagatcggcctgtatgaaatcgtgctgtccctcgttatggtgaacgcaacgattgcgactgtgttcgccaaatcacggctgacggccattatctcactcggtgttgtcgggtacacactcgcgctgtttttcgtgattttcagagcgcccgatctggcgctcacgcagctcgtcattgagacgatatccgtcgccttgtttcttctttgtttttaccatctgccgaaaatgcggcggaaaaagaagacaagaacattccggatgacgaattttatcatttctctcggtgtcggcgtcatcgtgacaatgctcggaatcgcgtcttccagcgaaaaaacaaaagacagcatctcctcctttttcaccgcttacagccataagctcgggggaggaaacaatatcgtcaacgtcatcctcgttgatttcaggggatttgacacgatgtttgaaattacggtgctgtcgattgccgcactcgggatttacggcatgatcagaacaaaagtaacagaggagggagaaaagcgttgagacagccaaaaacaaacgacatcatccttcagacggcaacgaagcttgtatcttttatcattctgcttttctctttctatttatttttatcggggcataacgcccccggcggaggatttgtcggcggactgattacgtcttcggccatcgtgctgctgcttttggcctttgatttaaaaaccgtcaaatcgattttgcccgtcaattttatttatgtggcgggcgcgggtctgcttatcgcgattgcaacgggtgcaggttcgttcttattcggagcgccctttctcacccatacattcggccattttcatctcccggtgctcgggaatacggagcttgcgacggccactttgtttgatttaggtgtgtatctcgttgttgtcggcgtgacgatgaccattattcaaacgattggagaggaagaatagtggaaatcttaatgtctgtcattgccggtattttgtttatggcggcaacctacctgctgctttctaaaagtctgctgcgcgtgattatcggcaccgcgcttttgagccacggcgtccatttgctgctcctgaccatgggcggactgaaaaaaggcgctcctcccatactgggcggaaaaagcacgtcctttgtcgatccgctgccgcaggcactcatactgacggcgatcgttatttcgttcggcgtcacgtccttcctgcttgtgatggcgtttcgcgcctatcaggaactgaaaacggacgatatggatcgaatgaggggaaatgatcaacatgaataactttgtgatattgcctattctggtgccgctgcttgccgcagtgctgctgatttttatgaacaggcacgtgatgctgatgcggatattcagcactgccgcttcctgtgtctccatcgtcatcagcgccgctctcgttcagacggttttcacacacgggattcagacgctgacactcggcggctggaaagcgccgtacggcattgtgctcgccgcggatcagcttgccgcactgcttgttttgacaaccgccataatcgggctgctcgtcaccctgtactccttccgctccatcggagaaaaaagggagcgcgctttctattattcaggggtgcagtttcttctggctggcgtaagcggagcgtttttgacgggtgacctgttcaacatgtacgtcttttttgagcttctgcttatcgcgtcctacatgctgatcgtgcttggcggaacgaaaattcaattaagagaatcattgaagtatatcgtgtttaacattgtgtcatccgcgttttttgtcatcggtgtcggttacttatatgcggtgacgggcacgctgaatatggctgatctaagcgtaaaaataagcgaatcgggccagaccgggctgataaccgtcatcggcatccttcttctcgtcgttttcggtttaaagggcgggatattcccgctgtatttctggatgccgggctcttattacgccccgccggctgcaatttcggctttattcgggtctcttttgacgaaagtcggcctgtatgccattttaagagtattcaccctgatctttattcacgatacgggctttacccaccaattgatgatgtggcttgcgatgctgacggtgctattcggcgtaatcggatctatcgccttttcggatgtcatgaaaatcgtcatctacaatattattacagccgtcggcgtgattttgttcggcattgccatgaacacgccggcctccattcaaggagcggtttattacttgattcacgatatgctgattaaaggagcgctgtttatgcttgccggcacgcttatcgcattgacaggcactgccagcctgcataaaatgggcggactgatcacccgttatcccgttttaggatggatgttctttatttcagccatatctttggccggcatcccgccgttcagcggatttgtgggcaagctgaagatcgcggaaggcgggttcgataagggggaaacattgttttccgtattgattcttgtatcaagcctgcttgtgctctattcggtgctgaaggtttttacgacggctttttggggcgaagaaaaagaaatccccggcgcaggcggacggtccgcaaaaggacttctttatccggcagccgcttttctccttttgtcgcttctgttcgggctcggaaccgaatgggtttcaccgtatgtcaatcagacggctgagaatctgctgaatccggaaaaatacattgaagctgttttgaaggagtagatggcatggcttttcaactattattaaacgttcttctcgctgtttgctggatgtttctcacaaacagcctcagcacggcgggttttataaccggatttatcgcaggcttggcggcgctgttttttttccggcgcttcttctcgcggccgttttacatttggaaaatatggtcagtcatcagactggtgctgatctttataaaggaattatatttggccaatgtcagcgtgctgaaaaccgttatagcgccgaaactgaacatccgcccgggcattttcgcgtttaagacggaattgacggaggattgggagatcacgttgctctcgctgttaatcactttaacaccgggtacgctcgtgatggatatctccgatgaccggtcgattctctatatacacgccatggatattgaagatgcggagaaagcgatccacgacatccgcgtctcttttgaaaaagccattcaggaggtgagccgctgatgtttacgtttattctgcaattatcactcggcattatggcggtttcgactcttctgtacgtcattcgcgtcatgaaagggccgacgataccggaccgggtcgtcgcgcttgatgggatcggcattaatctgattgccatgaccgcgcttgtatccattctcttaaacacatcggcctttttggacatcattctgctgctcggcattttatcgtttatcggcacgattgcctttgctaagtttttggagaaaggagagattatcgaaaatgatcgaaatcgttaaatgggccgtcgccgtttgtattctgatgggatcgctgatctgcctggtcgcgtctttcggcacactcaggcttcctgatgtgtatacgcgcgcccacgcctcttcaaaaggctcgacactcggcgttaatttggtattgctcggggtgttaggctacttgtggatgctgaccggagaaatttctgtaaaaatactgctcggcatcatttttatcctgctgacggcgccggtcggagcgcacctcatatgcagggccgcgtacaattcgggagcggcgcttgataaaagaagcgttcaggatgattacaaagggatcagaaactttgtgatcaaacgaaaagaagattcatatttgtaaaaacaaacagccggacgattcagggttccggctgtttgtttattttgttataacagccagcgtacagcgggaaacacagatcagcctttctcgttcatcgaaaatgttaatcccgtacacaatggttgccctgcctgtgtgaacgggttccgctatcgccgtgaccgttccgccctctttcactgactttaaatgattggcattaatctcaagcccgacacacgcctgtttcgaccggtcgataaaatgctgggccccgacacttgcagcagtctccgccagcgctgctgacgcgcccccatgcagatatccgaaaggctgcaccgtcctcttatccaccggcatcaccgccacgcatctctccggcgtgttttcagtgatttcaataccgagtgcgccgagcaatgtattgttcagattcataggtcattctcccttcaagatttatagtacgttatctgacttggcgatcagcaccgcttcagttcgggagccgacattcagcttattaaaaatggatgtcaggctgtattcaatcgaccgcttgcttaagtgaagcgcatctgcgatttcctgattggtcaaacctttttcgacctcttggagaatatggcgctctctcggggttaaccgatcctgctcactttgaggggaagaagacgtttttgttttttgctgggtcatcagctgtttgaaataggagaaatcaactaaaatctgtccgttgagcacgtgatatatgtattgcatgattttctctttagattcggttttgctgatggcgccatgcaggcccgcgcggatggattcttcaaaataatcttcaacctcatagcctgtgtagacaatgattttacagagaggattctcttttaagattttcttggaaagctcgatgccgctgatgtcatcacccagatttaaatccattaatatgagatcgtaagctgaaaaatcatgccggagaacgaattgttcactggcatcaggactgaggcaatcgacagaaagattcgtgtccgtttccagaatcgtcttggtgccctccatgacagccggatgatcatcaatcactagtatctttttcatggtttcctcccttttactcactcatttccattttattaaaaagacttggcttctgccaagtcgatttggtgataaaatggttacaattccatttcaatatccgctttaaaaccgtttccttcacttgtgtcgattttcatccgtccgtcaagcgcacggacgcgctccttaatacccgaaagacccatgctcatcgactgtccgccgccttcttcctgattgcagccgacaccgtcgtcttcataatgcagaatcactttattttgaatgctgatcagcataatcagcacctcattcgcctgtgaatgcttcatggcgttcgaaagaaattcctgaataatgcggtacaaattcagctgcgtatccaaatccagcgccgccgtaaaccggcccgtattcagacggatatgaaacggcgcacgctcttgctgctgcgcggcaagcttggataccgccttgaccagacccaaatcatacagcagctgaggccgaagctcatggcacgtctcccgggtcatcaaaatgacatccgacatctgctcattcatctgatgaagcttgtcctgcacctctaactggcaaggctcctctttcttaaaatcggccagaaacagctcacactggcgcttcaaagaaatcaaatcctgcagcactgaatcatgcagatcacgggccaaatccgaacgctgcttttcctcgatcgtaaacatcagctttttgagccagaccgggtttgagccttgttgtttcaggtcttgtaaatggttcatgagttcttcgatctgcaatatgttttccatcgaaacacttgtataaaaagacaatgtctttaaccaagatatctcatctcttgtcagtctcggagtattaatgctcgacaaacaaagcagaacgtatgagtttgcccctctttctccaatcttcatcagaaaaccttgatttacttcaaaaatcttgccaatctctgatgagactttaacaaattcttttttatacggctgccagttcggttcactgttctgtttatcaaaatacagaatatctccgtcagaactgatttcaaagatatatgccttactgacaggcaacacatctaatatcgtctttttaagattcataaacacttggtttaaagctgatacgcttttaagaagctgtgtatatttaaatatgctgtcttgataattatatttttctgaaaaacgtttcaggcgaaatttgtagtctaataactccttaatataaaataccgctaaaaaaatcaaaaatacatatacagtgatttgaataatgttaaagttattccccttgctgtcgaataatatattcagccatacaactccaatagtcggaataatggaaaggaaaccatagtatctaattctgcccaacaagaagtctatatcgtagattttattgaccacgaattgatagactaaagctaatggaataattattaaaaatggtgccgtaactatagcagaataaatatactgtccgaacaacacctcaggtataatataaaatactgtaaacggaaaaaaggctatggtattagatataagtaatactttcagcaaataaaagtgatccttttttcggtagactagtccataaaaaataatggatgtatagacgaccatcatttccaaaaaaaatgttactaaattaatattcgtaacaagttggaaggcaaaatgcttctggaatatctcgattattatattaataaccggcaatatatagagagtagacacaacataaccagctgaaaatttcaattttaattctttaaagtattgatacaaaaagtgaaagtataatacaggtacgttcaaaaatgtaaaaaggttaatatatctgtttatttcatatcctctagttactccacctgcgcttaaatatgcaatggatgtacacaataaaaaaataatcaaaataaaggctgaataagtatcttttactctgttaactttataaatataaaaaatgcataacatgcttaaagcaaataatatgcatgggataatatagataaaaaaactataagagctatttaaggaaataaactcagtattatgtaagtctattttactattaccccttattattttcatatgttcagctttcgctagatattgacctcttatattctcttctgtcggtgtttttccgcttatttcaattatcctgtctccctcttttaagcccatatatttaccatacgtagacttggagagttttacaacctgcaattcatggttattgttttcaaccacataggttcctaccaaaattccgttttgagtaaaatatataatatgagcgacgtaaaagagactgacgaataacaatacaatcgaaaaatttctaatgaattttttcaatagatctcactctctcaatcattgttcccaaaaaattcccctgcatttttttgattgacttaagtccctttcaaaaatctcaacaatggcaggtaacagtttatccggaactcctattaaactagcttccccacacgctaactttgtaagtacaagtggattttccataagataatgtacgatatcttgcttcactgtaatttcctccattaaagttctaacattatatttaaatcttttatacttgtcgtaatttcttcctcgtacattttaattaacattgaaacatactggctaactcctgcatcaaatagtaggtcttcaaggctttttttattatcaatgaggaatgaatggtaacttgcttctgcattcattaaatccaagattttttctgaagcagcattaaatcttcgctttagatacaacagaattaatgtttttcttccctttctgatatcactacgatttttattaaaaagaccataataatcattttcaatctgtttaacaattccaattttataggaataattctcaatttcttcgttaaactccccatttgcaagcattgttcctaatacagctgacattgcagtaagcgagcctgatttttgtttaatcatttgaagacattcgtcttcagtttcggggaaattttcgaggtcattatgctgaccttgcattgcatttaaagcatatttcatagcaagccggggaaaatcggagttcgttttaagctcacaaatcacttgaagacttattgaataaagagaagtggctgcatttaaagagatagattgatctatcttcatccattccttatccaagttatcttcatcctctatatcgtcaaaaatatcaaaagctaaaattaacaattcaattcctgaagctaataacgtaatatccgaataatgctcaccatcgaaagccacataatgcttaaatgcaagaacaccaaaagcaaaatgatttttttcatttataaaagtctgaagggtgtcttttaaatgtggattatttattttctcctccacaatttccttcatcttctctttaatcgtttcggcatctaaacacatttgctcaataattgtcttcaccctcccattctattttactaaatgcaggtgatgaaagacagcaggtttttcgttttttaacaatcgtataatactttatccatgaaatggataaaaaatgcacaaaaaaaagacttgtttccaagtctttttaagaaattttcattgcatatgagaatttatcgagctgatcaatgcttttgttaatgtttcgtaatgagtcggttgtttctctgatatcattttcaagtcggaataataattgctttacttcttctaatttgttttccaccgtttccacactcctttttttgaaagatcaatgaattgtgtatggtgaacgagtcctaggtatttgatctgttactaatagtgtaaacgtttttgcgggatttttcaccgaaaagtatgtgtaaaagtatctgcgtgacaccgcaaaccaaggtaattccatagtcccgaacagggcatttagcgaacaggactatataactaccgcaaaggcagacgtttaggataaagcagaccaatctggcggttctgctgttttttcaacggttttccgacaaaccggcagggactatagtccctgccgtcacaatttcaaaacagaatgggcaaacagcgtcgcataaccaccgacaaacaccgaaaagaccgcaacccccgcattgtggtctttttgcatgtcataactcattatcacgccgcctatactcatgtataacgaatgttttctcaggaaggaggccgccgtatgcattatgtgtatccatgctgccctgttttcgccgcgccataccggcatccagcgcccagtgccccggttcacgcagatattttgacagcgtccgcaaaagaagctgcgggcatgctggaggatgcgcgcctgctccttgcgcggctgtcggcgtcaaaagagcttgcgcgcagcatcctcaccgcagcgcaatcatctgacaccgcagcggtcaagcggctcattaagcagaccggcatcaaaaatgactttgacgtgacgtataatcccgacggcatccgtgtcagtctgatcagagagcaaagccggtttatcatcgccctcagatggtcggcttaaagcggctcaatcgatcagctgccggcaccattcgatcgcctgtaagtaacattcatacgcttcttctttgttcagttcttttccccactcgtcacagtcccagttgttgcattcaatggctttgacgagcgcgagcatcttataataatcgttttcataaccgagcagcgcctgtccgacttcatcgattaaaggcagttctttgatgatatcctccagttccctgtggagaagcgtatcgatgagcgaaaacatgccgatcagcatgtaagaagagggctggggccttccggttcttttcgccagcagttcgcacagtttggccctgattaaggaaatcttaatgatttctttttggcttgagtggcttttcgccgttaaatctctgaatgaaagaatgtaaatcaagcgcttaatctcattcagcccgagcatcatgatggcctgctggatgctgtctatcttttttttcagtcttgtttgcgatccgtttaaaaaacgcagaatctgatacgataagctgacgtcacgctctatgtattccgtcacgcgctgtatattaggctggtcattgtttaattcgcttaaaagctggtagtaagaatgaaaatgaaacgtcagatcatttccgctgatgacacgcggttcactgaaaaaatatccttgaaacaggtgaaagccgtctatggccgcctgtttataatcttttctcgtctccactttctccgctaaataaatcagacttttacagctgtacgtctgaatgatttttttgcgctccagacgcgaggattgcaaaaagtcgatttttaaaatatcaatatatttcatcagctgttccactaactcttcattttccggattgatggcgtaaaaatcatcaagtgctaatgtatatcctaatttcttcagctgtctgcatcttgagatgagcgccggagtgatcggtatgtcctcaagaatttcgataataagctggtcaggatcaaaggaggtagggagatctgaaaacatcaggctttctgtaaaattcacaaagcagcgtttcccctcagtcagcttttcgattccgatgttgataaagctgttaataatgagatccgtcgtagctttatctccatccgcggccgaataacggttctcttcgctctcccggtaaagaagttcataagcaacaacctgttcgtttctgttgaagataggctgtctcgcaacaaacaccttcattcatttacccccttagatgcggccttcgaacataagtatatcaaataacttgacgaaatttgtctaaatgtgaaaaatattatcacaacaaaaaagcctttccagagataggaaaggccgctttgttttctattcaagttcccgtttcagcttgcttttgatttcatgaatccgctgcatcttgttgctccagcagtcttcgcttaaatcgaccggatattcttccggcttgctgatccgtttgtattcctcccacagaagtttgaggttatcctgcacgtattgctggatgtcggtaatttcgggattatcatagcataaaacgccgttttcaaagatcggctcatgcaagtctttcgcatagaagtcagtgacgaatttgctgacgaacgtgtggacgggatggaacatttttaagcgtttctgatcatttacccgctcgtcataaagcgcgatataatcaccttccgagtggtgattcagcttgttgataatccggtatactctctttcttcccggcgttgtcactttttcagggtttgacgaaattttaatggtgtcggtcagtttgccgtcctcttcaatggcgacaagcttataaaccgcgccgagagccggctgatcgtatgcggtaatcagcttcgtgccgatgccccacgtatcgattttcgctccttgggatttcaggtttaatatcgtgtgctcatcaagatcgcttgaagcaatgacctttgcgtctgtgaaacccgcttcatcaagcatttcacgcgctttttttgacaggtacgccaagtccccgctgtccaggcggatgccgatgaagttgatccggtcgccgaattcctttgcgactttaatcgcattcggcatgcctgaacggatcgtatcgtacgtatctacgagaaatacgcagtctttgtgggtctccgcatatttcttaaatgccgtatattcatcgcggtacgcttgtacgagcgcatgagcgtgcgtgccggataccggtatattaaaacgctttccggctcttacattactcgtcgcgctgaagccgccgatcaaagccgctctcgctccccacatggccgcatccatttcatgggcgcgccgcgttccgaattcgagggcgtcttcatcaccgacaacgcctttaatgcgggccgctttcgtggcgattaatgtttggtaattcacaatgttaagcagagccgtctcaatcagctgcgcttcaatcaggggtgcttcgacccgcataatcggttcattgttaaaaacgagctcgccttctttcatgctgtaaagagatccggtaaaagaaagatcccgtaaataatcaatgaaatcatcagcatagtgcaattccgtttttaaataattcagatcgctgtcggtaaatttgaagttctccaagtattcgattgctttttctaagcccgcaaataccgcatagccgttttcaaagggaagctttctgaaaaaaagctcaaaaatcgcttttttctcatgaatgccgtctctccagtacgtttcggccatattaatttgataaaggtctgtatgtaaagacaaactgtcgtctttaaaaccatgctccaccaaaattgttttccccttccttactctgccacttgcgctccgatgctgttcttaaaatgggacagggcccattcatgcccttccggattaaagctggccacagcgttttgatgaatgacgatctgaaagcccttgttgtaggcgtcaaccgccgtgtgaagaacgcagatgtcggtgcacaggcccgcaagatgcagctcagtgatctgccgttcccgcagtttcagctctaaatccgttcccgcaaaagcagaatatctcgttttttccatataatttacgttttttgcgtgtttatgtttctcataaagaggcgatagccttccgtacagctctttgccctccgtgccgttgatattatgcggaggaaacaggcgtgtctcgggatgaaagtcatcgtctgcatcatgcgaatctaccgcaaagacaacgtaatcaccgttttctataaatgcttgcgtcaaactgacaatcgtatcttcaatctgtctcgcgggttctccgcaggttaatgccccgttctcagctgcaaaatcattcgtataatcaatgcatataaatgcttttttcatagccggcctccccgccattcatatgaaaaccattatatcctatctccacttgtaagtgaattggcattgtaaaatgacaaacagtgttttgcccttttaagatttcaggagtgagcgctgaaaaatgtcatcctgcacgtaaatgccgtcaaggttcacggcataatcggcggcaaaaaccaggccgagcggcgtttcgaattgaaggtccgagatgacggagcttcggacaccggcaagtgcggcaagcttcatatatggtgaataagcatgatacgggagccttccgtttatatagagcaccgcgtcttttcggcttttcagcgcctgtttcacttcttcatacggctgcttttgcagcacctgtcccttcgtcagggcaatgatgactctttcacgcagcgagcctaaaaataaatggcgttcatccggtttcgtctgcaaagggccgtacatcccctgctgtaaataaaggtcaaccgttttgtcgctcatcggcctgtccctcccagcttgttttacaattatcgccccggacgggacgcggtaaaccgttttcgttacatttcagccacccaatgggagatcttgccggcgagctctccggcgggttcttcttcaatcagcttgctgaatgattgtaaaagccgctgcgccagcgcctttttctcttcctcataggaaatgatcgtgctccactcaagttccggaacggctacaagggtatgctgttcttttttattttcatgcagatatacatcaccgatcattccggactgcacggtaatattcgcttttctgattttcataaaacattccccttttataaagactgattctattatactacaaaaaagcgacagcctcctaaaaggaggctgtcacgcgttaaaccaatcaggttcgtcaaacacatcaatgtcttcaaagcgcgttttgctgaatttattagtaattttgacaaaatctccggaatgaaacgcccctgcccccgcgcctgagtggtcaacggctttgggagaaatggcaaacacgtcaccgaagctcgctgcagcgtctccggctaaactcataatataaatcggtcccacaattgcaggcatacccacacctccgcttttctttacagcattttatgcgctgcaccgggagttgtgcccgtttttatttcggcttgcggctgtcttcgagctttgaccgctgacgaagtttgataagccggacgatatttaagacgaaagcttttaaaaccgcgtaaaccggcacggccaggatcattgcgagaatgccgccgaaactgcccgctccgataagcagaagaataatggtgagcgggtgggtattcagccgttttccaatcacaagcggagaaagcaggttcccgtcaagctgctggacgacaacgacaacaataacggcaaacagcgccttagccggcgaatccataaacgcaataatcaccgcgggcgccgccccgagaaacggccccaggtacggaatgatattggtgacggcgatcaccatcccgagaattaacgcatacggcaggccgatgatccaatatccgataaaacatgccgttccgacaaagagacaaatcagcagctggccttggaaataggcggccaatgtgacatataagtcgttaaatattttccgaccttccgcccggtaggaagaaggcagaattttgaccgccaagagcggaaaccgccggccgtccttcagcatataaaacaaaatgaacggaacggtgatcacgacaagcgtgatattcgtaacgacgccgaacacggccgacaggcttgccgtaatattttgcggaaggctttgtaaaaatcccgtcagagactgctggattttttctatcgacacataatcctgcgtcatcatccacgtaaaccatttggaatgggataattgcgccgtcaagacttgaatctgatgaatgtaatcagggaaattgttaatcagccccgtgacctgggaagccacaatcggcccgatggcagtgaacataaaggcaatcagaccgatgaaaacgagataaatgagcaggatcgccaatgtccgggggatttttttctcaagcaggcgcacgatcggattaaaaatgaaaaacaaaatgcccgagatcaaaatcggaaaaaacagagtggtgataaaaccgaaaaacggctgaaatataaacgagactttcgttgatacgtaaataatgagcaaaacgagcaaaatttgcagcgtccaaaaatggacctttgatttcaacaagcggtttcctcctattgtcgtgtgaacttgtactgtgattgtaccaaaaaaagccgccgtgcatctatgtatctcaaaaaagaagacgcaccggggttctatagtgccgcctccggtttgcgccttttcgggctgttacacgcgttcggtataatcaggcatgacggaaaccacatggcggtttctgatataaaatacacggtcatgcgtctcttcaatggcgatgtgatccggagtggcatcaatcagccgtcctctgacaatgcgtctgacggtttgaatgataaaccttgagccgataagcttatggatggtctgataaacgtaaggatccactaacgagacgatttgcgggcttccttgatgggccattttcgctgatcccctttactatgttttccttcagcatatgcagcggacaaaggctttgacacagtacgtctatcggagcggaaaaggtgttagtgagcatgcggagttatgtaagcggaaaaggccgcatgagtggcctagactgagcttcttatgggatattgggctcggtcaattaactgatcaagcttttggatttgtttgagcgcggccgtgtgatccatttggcggtaatggtgatgtccgccgggttcttcatcgagttcatccgcttgtttcacgatttgctggagcgtattcttgtccagttcgccttcaggcagataggaatcggtgtgaagcagaatcgccagcgcaatgtccttcgccgctttcggttcttcaccgagccggatgagcagcttatgcgcccgttccgcgcctttaatggcatggatatcatttcttctgtacttttcataatcccatttgccgtctgtgtaccattcataatggccgacgtcatgcagtaatgccgctttcgccgccagatccgggctgacacctgcttttacggcaagacggtatgcatgaaacgcgcaggcgatcgcatgggcgacaccggaacgctgtaaatacttttgtgcgattggatgggtgaagacatccattaacgttacatttctcatggaaacccctccttcatatatttttagaatcctaacataaatcgagaagaaactcaattcatctgatacatttcttataccccttatatgttgtttcattcatcatatgccgccggacccctaagtgattgtacaaacaaaaaaagagcagcgtgaaagctgctctacaaaaattctttgatatcgtatatccgtccgttttccggctcgcccgcgatcagtgagtgaatgacgccggcgatgtattcaggacttctgaggtttttcgtttctttcagattgcggaaccgttcgatgtcatggaaatcttcttttgacgaagaacggatgaccgactgcatgtctgtatccatcactcccggcgagaatgatatcatgcggaccggcagctcttcatcttcctgttcaaacccgaatgttctcgtaaacatatcaagccccgcttttgagctgcaatacgcgctccagcctttataaggatttttcgccgcgcccgatgtgatgttgacaattgttttgctgccgctgaacgcttcgaagcgctttgtgaacatttggctgagcaaaacgggcgccgtcaggttaagggtgtaatggcggttcaattcttcggcggaagcctctttcgcccgcttgatcggttccaccattccggcattgttgatcagtgtgacggcggagtaccccttctcctctgcttgatcaagaatcgccttcatctgccgcccggtatctgcgagatcggttaaatcaacactgtattctgtcagcccctcgcgcttttccccgcttatcgttcttgaaagcgcggcgacttcggctccttcttgaagcgcctgttccgtaagcgcccggcccaagccttttgacgcgcctgttataagaaaaaactgcatgaaactcctcctttttttcttattttacgggctgtcttcccgcaaacacaagcgatccgttttaccgctttgccttttcctgcgccgtgactttcgggatcagatagatcattgccgcaatcccgaggaggatcaagacggcataaatagcgggaagcagataagaagtctttttctcttccgtttccatatctgccgaggtatgccgcaccgccggctcggcaaatgtgatacccagttgtttcgattgcgctttgatcgtattcggctccgtgtctgacgatgtaaacaaatttgatatcagtttgtcatccgggttttcggccggctgatcaaacgtgatatccttctgttctttcggaagcgccgttttttcctcggagtaggcatcgtcgtgcaggtagtccgtacgaatttcaatgtctttcttttcatattcattcggcttgacatcagtattttcctcattcgcggctgcggcttggggaaggaaaaggaaaaaggagagagcaaacagcagcaatcctttttccatgaacgtgttacgcctcataagactgatcactttcctccgttttttccgcaaacagccgaatgacgagcggaagcgccgccgcaatcagcgtaatgatcgcaagaaccgttacccccaacgcaaacagatggcccgttccgtattgaatatcgatatagactttcgaaaccggactgtcaaaggtgaagttcggcataatcaggtcgatcaaaggcgccacataaaagagaatgagcgctgatgatgcgatccatccggtaattgagctgaagacaaaggctgcccggataaaagctgaactcgccgcaagcaggagaatcgtaaagactgaccatttaatcgtctgatcatccggaagcgaatagatattcagaccgaacagactgatcatcaatccgaccataatgtttaaaatcccaaagagcgcgcctttgacaagaagcggcgcctgctgataatacgagctgaaatagccgatcagaagactgctgatcaggacgatcaccaaaatgacgaccggcggaacattctgaacccggtcttccggcacctctccgctgattttaagcggattggcgagataatcataaacatatccgttttcctgtccgtcaacgagcgcgttccctaaaatgccgtacacgtcatttctgatcaatttcgtggaatcgacgtttttgccccagttgctgttcagggtgtccgctttttgctggacgtcatttacgctttgctgcatattgtcggtatagctgatgatgccggactggcgttctgacagatggcccatcgtgtcagacatttgcaggacttcacggccgacggtatcctgagcgccgagcgccatcgttccggttaatccgtctccgctgaacgcggccgcttcctgcacagcgccttcagccagctgatcggatgctttcgccgcgctgtctgaaatgctggcaagctcatcgagcaccccggcttgctcatctctgatatacgagctgtagttatccgagaattcggtcatgcctttaatgaaattgctgatgtcttcatcagtctgcattttgttgtttttcagattttcccagcttgccgtttcttccggtttgatggcaagaacggtttggacttcaccttgctgggctttcagcacccggtttttcacatcaggcagcgagcccgcgtcaagagagtgatagagtgtcgcctcatacagggataaatcattatagtaactcattaaatcggatatcttttttgtattgatgtcagcggcaaacatctgttcaagagcagatttgcggccgctatccaatgacgggtagttcagaatgttctgttctgttcttacaatcattctgtaaacggtatcgaagtcttgttttctcgtttcttccaattcttccaaattttcctttaatttatctgcccgtttttcaactttggcaatctgatttttaaggccttggatttcttcatcaagagcatcgagacgttttttcagttctttattatgagtctgctgtttctcttccagctctttttcaatttgctgaatgcgttctgcggcttggttcagcctttcttttgcctcagatatgtccgtgccgccgtccctttcagaatcgtttggatcgtccgccggctcatcagcaggcggagtgacgttttcagcggctgtcgaggtctggacggtttttggctcctgatcgcctgtgttatcggaggcaggctgctcttcttttgtgccgtcttccgtttttccgtcttctccgggagccgttccgttattcggatcggtatcgccggagttttcaccgtcatcgccttggcccggttcttccggttccggtttttctttttccggttcttttaatccgtcagaaatgtgattgatttcagcggagatgcgttttaattcgtcacgctgatcgtcaaggtcaattttcagatcgccgggtttttcttcttccggtttttcttcttctttcggttcatccgagccgtcatcacccgggtccttttccggaacggttaatgccggccgatcccttttcataagggtttgaatgctgttcaatgtttcaaatcttgcttgcgctttatattgagtcaaataattgtccagtaaattggattgaatattcgccatcccgcgttcctgatcaggaacctgcgcttctctcacctgttgggcggcaaaaagagccgatcccgtctggtcaagctgtgtctgcgcccggtttatgcctgaagagagcccgctcatcatcgtgctgaactggttggcggcctgctgtgctttaatggcgttcagtccggttgtgatttgcttttgattttgttcctgcgcggccatcagcagttttttctgattttcttgatattgtttgtagcgctcgaccgtgtcggcaaagtctttgagcgtggttttggcttcatctgccgaagtcagtttttcttttgccgcgccctgcgcttcattcattgattttttcagttcgtcaatcaggtctttttgccgtttgatttcacctgccaagtcattggagctcggcttgtaaaagttgtacatgacattttgaaactctgattctttattgacgatcttgtcaaaatcgcctcggacattgttcactttttgtgagacgaaattccaatataatgccgacatttttttattcattgatttttgggcgtcttcaagctcacgctgcactttttctttgttgacggcgttcaggttgctttgaatattgaatgtcagcgtggctttttgcggacgctccttgtcatagcttaagatgtcttttgaaaaatcggatggaatgtaaacgacggcgtcatatttcttagccgccagaccgttttctgccgcgctcctgttgacaaccgtccatgaataatccggacggccgccgagagcggccgctacttctttgccgaaatggacggattcctcttcctcattttcatctgtttgtaagcccatatcttcattcacgactgcgatttggcgggtggcgttgattttttgttttcccgggtcatcgccgataaaccggaaaaacagcaccggcagcagcagaatgatgacgaccgcggctattaatttgatcaggctttttcgttgttcggtcatctgacggcctccctttccgctgaacataaaggtatttggattttttgctccttcccgttttcaaccaaatagccgaagcccggctgaatgtccggttcctgcctttggtaaggcagcggaatgacattttgttcggattttttcacaagcagcatcgcgtggcggatctgtttcatttccgtcgttaaggaatcatagccttttgagaattcgctgtgattgcccgccgggataaaactgaagcccacatgcgcgtaagatttcataaacatcgccagcttgtcctgtaaggcggtgtcgatcgtctgctggaatcttgtaatgccgtcggccattaacacgaccggagagaaactgagtttgtgcacatcgccatttttgacggcctgcgtatactgagcttcgcgctccgtgaaaatggcttctgccgtttcgatccactgccggacgtcttcttttgtgtccagatagctgacctttgtttcctgcgcatactgcgacagtccgcggtcaatcgagtcaaacagcccgacccgttccgcaccttcacgcagcaggtgattcagcatcactttcaggatatttgtttttccacgctgtgtctggcccaaaataagacaatgcttatttttacccagatcaaagtacacagggctgaccttttcctcatgaagcccgacaggaatgcggaacgggtcttgttccgggccgagacggagtgaaaattcgccggccgtcagcatatccggaagcatcggaatcgggtctggtccggctgttccggcgtggcgctcagctaaagctttgacatcagctttcagcgcctggaacatctcgaggtcattttccgcttcagccggaagaaacatttgcgcgaaatacagttcttctttttggatcatgacgcggcccgggatcggttcgagactgaacggcggacgcccgtaaatggagtatccttctgactgatccattaaataatggacgactttcgtttttatgttgtttaacagcgactggcggacggcgtttaccctcgttgcggtcagcaggaagtaaatgcctaagctttgcccgtcgcgtgaaatctggataaattccgtttctaattcatgcatttcgtctttgacgatgtcgaaattgtcaattgtgataaatataaacggcagctcttcttcactgagcgaattgtacattttgatatggctgacttctttttccctgaacagccgtttccgccgctcgatttcttccttgatgcggatcatgaatttttcgatctttctcatttgatccattaagaaatagtctgcggtgtgcggaagctttgccaatggcagaagcgtgccgtttccgaagtcaaagatgtacatatgaagctcttccggcgtgtatccttccgcgaaattcatcaggaaggtgatggcagccactgacttgccgtagccggatgagccgaaaatgccgatgttgccgtcatccatcattgtgtaagcgagaggcgcctgtctttgctgatcaggctcatcaacgcaggcgatgaagaagcggtctttttcctgcgcggggtaaagcgtgcgcgggatacgttcggcaagcggcggaagccacgggctcggcagcttttcaatgcccatttcattttgaatccgctcgatttcttcgactacggcttctatttctgccggggcgtcttttttcgccgcatcatccgcatccacctcagacagcggaattaagccggtatcggtaacgatggcaatgtcatcctcggtgccgtatacatcttccatgtaaggggcgccgctccaggcagactgaaactgctcatacacttcgttatttccgacttgcaagtagccgcgtccggtgaccgtaatattcgccgcatcactgtttttcaggatttctttactgtcacttgcatcctgcactttcagcgcgaccttaaagcgtgagttgctccatatttggtcgtcaatgatgccgcccggcttttgcgtggcgagaattaaatgcacaccaaggctccgtccgatgcgggccgcgctgacaagctccctgataaagtcaggctcttcgcttttcagctcggcgaattcatctgaaatcaaaaacaggtgcggcatcggaatatccgtttctccctgtttatacagttttgtatagtcattgatgtgattgacgcgatattgatcaaacagccgctgccgttttttcagctcgctcttaatggatgcaagcgccctgatactgaagtttctgcttccttcaatattcgtgatggtcccgagaaggtgcggcattttgcggaacggctgcgccattcctccgcccttatagtcaatcagcaaaaacgccgcttcatgcgggtgaaagtgaacggccaatgacaggatatatgtttgcagaaattcacttttcccggagccggtcgttcccgccagcaatccgtgcggcccgtgcgctttttcatgcaggtttaaatagacgatgtcgtcttttcctttatagccgatcggaacagccagcgattttgcagactcacttgtctcccacttctgcctgatgccgatttcttttacttccttcgcatgaaacagctcgagaaatgagaccgtttcaggaatggaattcgtcattccgacctgatggtgcaatgtccgaagcgtccgggaaaaccgctcgttgtttgtccgttcatgcctgtccagcttaaacgggatctgcaccgcttttttctgttgaatgagaatgtctccctcatcttcattaatgtagcggacgagggtgtgaatgttttctgccaggctttcctttgtttccgcggcaatgatggccgagatgccgagatgctcatgccggccttcgatgtattctaaaatgacgtgctctgcgatcagctgctgatttgtgatgacaaagacaaaatgcggctgaaagatctttttttctttatcctcttccaaatcccgctcccgcagcagctcgtaaatggacgataacaattgatcgcgggtctgttcattgtaaataaatcctttcgcatacatatgaggcagctgaaattgcggcagccacttcatccattcccattccttatattcgtcctcatgaaagataaagacaaatcgcaggtcatggtagctgttgaagaacgcgagctggccgatcagctggtgaatttcatttttgacgatctgaggtttcccgacaagccccatcggcccttcttgtaaatcaacggtcacgggcgcatggcggatgtctttatacacacgctgcatgtgctgcgactgctccatcaagtcatccacatcacggttcgccaggtctccgccgctcattgaaatctcgtagcttgacgggaccgtgcccgttccgagccgaagcatcagaaaatccctgctttccagcgatttctcccaaatgcggccgctgatttcagaagttaaatatttcattttttcaaacgggggaaaatgatgcgtcagcacgtgcagctgtttttccgacagcgtctgaagctctttccgtttgctttctaaatactgcttgtacacacgctcccgtttttcctcccgttttttccgctggtttttttcacggaaatactgcacggtggacgtaatgagagtcatcataaacatcgccaaagagacaaggatgaatatgcccctcggctgtataatagcgacaacccccattacaatcagcatgaccacaggaggcagaatgacgagccacagcccccggttattctgttcgctttcctgcgagggaaagctgaatgaaacgcggtcttcgggaagatcgtagaccatgcgcggcgttcttcgatattgcgggtatttctttttcatttcggtgcttggttttaccgttttggttaaaccggcttgaagcttttcgtgatgaacgatttctaaaaggtcgtcctccgtcagcctcacacgcagaaaattccacagcagctcatctcccgtccggagcctttcgggagcttctgcaagctttccgttcacataaacttcctgaccatcagggacgacagaccagcatcctcccgacttacgcagataaaaagcccctgtttgagcggaggacggctctttgtatatatccgcttcctctgtttctgatgagaaaacgatctcatccttcccgccgataaagtacacggaggattcttcctggtcaggggtgagcagaagccgcatcgtctcttcttcaatccggcagggcatttcatttcctattgtcaattcgccggcacagttatttcccaggaaaacatcataacgatctgtttctttccgataaagggttgcggcgttttgccgtaacggaagtgtgccgaccgtgattgtatctttcatatccggaccgatcgtaatcggctgagagggcgggagttcagacagctgaaccttttgtacgtgctctcggtaaaagacccataacagactcatatggcgaacctcctgacgacagcctgatcgttacatgcggccatttgatgtgtgctgttattttttttcatcttttttctcatctttcttgtcgttctctttgttatctttcgctttgtcttgtttgctttcatcttgtccggcggaagcttcggcggtgtcactgttttcctccgcttctttatgctgttcctccgcctcttttttcgccttcgcaagctcgctttccacggcgtccagttctttctgcttttcgtcgtctttcatactgtcatccgctaataattgctgtttatattttgtaagtccgagccagatgtacgggttgtactcaagattgcggccgattttgatggcttcttcattttcccctctgccgatatcaatccaataaaggaagtgcttcgggtctgattgcagcgtgaccagattcccgatgtttttccgctgttcttccctcagattttcaactgccacataagaggaagcaagctcgtactgcacagattccgggaggctttccgcatcgtatttagcgagtgtgtcaatgactttgctgtactgctgatttaaaaaatagcggttgctttccgtaattgcctcttgcttcggctggacgaaaaacagaacgtataaggagtaaagaagtgccggcacaaggaggacggcaagcgccagaccggcgtatctttggattttccatttctttttcggcagttttatgtatgtcttgtccctttcttcgagggaatcgattgcggtttgaatggcttcttccagttcttcaatcgtctccgcctctaacacgcttttcacctcaggagagaaatgaagcgtctccttgtacttcaaatattcatcgaaggtgtacgccccgtcagctgcaagcgccgcacaggctttgagctcttttaacaccctttctctatcttcctcataaggcggaaggctctcctttacgccgtaatgaagaaagtaaggcgtcagcgctttatcaaacacgatattttcaggggcggcaatcagattgagacgtttcagcttatgctgtttcacggcttggacgagacggtaggcaaattgccacctgctttttttatcttttccttttatatagcggaaagcctgataagaagaaggaggtttgattgtgatggttacttcgtcttctgaaactgagacctctttttgaaaaaaaggatcggcatctttaatcacattcgcttccagcccgtcaagaagcttgattttttcccgctggaaggtgaacgtgaagcctgattcggtttcttcccggacggcgtctaattctgtttctaaataagatctgttatgacctgtcattccaccatgtcctttcataaaatttcaaggcggtctccgttcgtaatgccgcagtcagatagcttttgttctccggaaaaaaccgtttctttattgaccactctgatccaatagccttcacgcggcggaacggatacatgctgagcctgccgggcaatatcaatgacttttttcacagaatggtaatctgacaatctgagatcgaagacgctgccgttataatgtgttaaatctattgtaatatcgatatacatattcatatcacccttacatagaaagagcgccgtcttcttgattgaatcaggcgctccgtttcttcattcatcttattatccgcgaatttggttagcgatatcttggtcggtagactcaagcgtatttgccgtttgatcgagctgatgattcacatcttgaagcaattcagacattttaataaatgaaggtttcagctgctcatattgatccgcgaatgcttcacttgaagcaccttcccacatgcctttcaaatcagaaatcatgcggttcaggcggtcaacctgattcatgacttcctgactttcaacgccatattgcttagccatcgctcttagctcttcgggtgtgacacgaattaatccagacatattccttataccctcctgtgtcatcagcctaaatatgggctaattcacttattttttgaacgtcattattataaaaacaaccaatcggcacagtcaaacaaatctgttttaattttacaaaatgagtcttatgatatattggatttttcgtcataattacacattttgtaaataaaatagtatgattttcttattattttcgttttcactgaatgatcttattgtcctagtctatttccctgcaaagatgcctttcagtctgaaaagcaagatggtaagatcaagatatgaagctatgaaaaagtagggatacagatgaccaatccaaaagatccatttaagtacagtttcgacaggcttgaagatgttgccgaccatatcagtgaagttcttcaatgccccattacaatagaagacgttaatcataaactgcttgcatacagcacgcacagcgattgtacagatcctgcccggacgtcgacgattatcgggcggagggtgccggaaaaagtcatcaacaaactgtggaaagacggaaccattccggcccttttaaaaacggaccagccgatcaaagtgaaagaaattgacgaggtgggcctaagcaaccgcgtggcgatttccatctggaaaaacagtcaggttctcggatttatttgggcgcttgagatcaaaaaaaagctcaatgacgaagatctgaagacacttcagctggcagccaaagcggtgcggaacaagcttttgcacctgcagatccgcaaaacgaaaatcgaagagcggggccaggagtttttttggaaaatgctgaccggccatatttatcaggaagccgagatggccgaagggtttcataagctcggaatggcgctgccgtccgtgttcagcgtcatgatcatccgtttacatgatgagctgactgaaaagacggaacagcagctgcaatatttgcaggaaacgacacagcagattcatgtcatgctggcgactgttgattcaaatgaattaatcttattagccgcgccgaaaaccgatcagccttttaaagatttaaagcacttcgctcttcatattcaaaaacagttgaaggaacgatataaaattgaggatgcgtcgattgcgatcggcggtatttacgaatcgatttcttacgtttaccgatcctatcaggaagcgctttccgtattaaaagcgaaagagcggtttgtgagagaaaccaaacaccttttcagcttttctgaactcggcatttatcagtaccttgatgtgttggatgaaaaacgcaagcacagcggctatatgaactattccctgtcaaagcttgagcagtatgacagggagcaccaagccgatatggtaaaaacgctcgaacattttattgatgccgacagcaatgtcaacaccgccgctaaagcgcttaacatccatgtcaatacattgaattacaggctgaaaagaatcagccagatcgcagaaatcgacttaaaaaatgtgaatgagaagtttacgatttacctggatatcaaacttcgcagcatgggttcgtgaaatttcacaaatccgtgtttttttattttctgtttcaaacaaagaattttcgcaaaaatcgcgctacacttgaagcatcacacaaacattgggggaaacagacatgattatcggggttccaaaagaaatcaaaaacaatgaaaatcgagtggcattaacacctggaggcgtttcacagcttatcggaaacggccatcgggttcttgtggaatccggagcgggactcggaagcggctttacaaatgaagattatgtatcagcaggggcggaaattctggaggacagaaagcaagtatgggatgcggaaatggtcatgaaggtaaaagaaccgctggctgaagagtatgcgtatttccgtcaaggtctggtcttgttcacttaccttcatttagccgcagagccggaattagctaaagcgcttacagaaaaaggtgtgacagctatcgcgtacgaaacggtaacggacggacgttcccttccgctgcttacgccgatgtccgaagtggccggcagaatggccgcgcagatcggggcacagtttcttgaaaaaccaaagggcggaaaaggaattttattagccggcgtaccgggtgtatcccgcggaaaagtcacgatcatcggagggggcggcgtcggaacaaatgccgcgaaaatggctgtcggactcggtgccgatgtgacaatgatcgatttgaacgcagaccgcctgcgtcagcttgatgatattttcgggcatcagattaaaacattgatgtcaaaccctgtaaatattgcagattccgtcgcggaagcggatcttctgatctgcgccgtgctcatcccgggagccaaagcgccgactctcgttacggaagaaatggttaaacaaatgaaaccgggttccgtcattgttgatgttgccatcgatcagggcggcattgtggaaaccgttgatcatattacaacccacgataatccgacttacgaaaaacacggcgtcgttcactacgctgtcgccaatatgccgggcgccgtaccgcgtacgtctacgctcgcattaacgaatgtaaccgttccttacgcgcttcaaatcgccaataaaggcgcggcacaagccattgcagacagccctgcgcttaaagcgggcttaaatacggctaacggacatgtcacgtatgaagcggtagccaaagacttaggctatgactacgtgcctgctgaaaaagcaatgcaaggttcggctgcaaaagcttaatagagatgaagaggacagcctgatcagcgggctgtccttttttctttctcacaaaaggaaaaacggccccctgtctcgaatatcaattcatatcccggaagaaaaaggaggattcatatggctgttcagcactatggtgtattaaaaggcactgtgttagatatgaaaagggaaacagatgatgattctccgcattttcaagtcgaggtgctaggcgagcctgatacgcgctatcgctgtgcgatcaatgtcatgtcaagttcaaaagaatcagaggtgctgtatgcggcacgcgatcattttgacgcaagcgcgatcaccctgctgccgaacattccgtacggatataccccaattgatgaaaccagacgtgagctggcgctggattatgtccgcggcggattgtttgatccccggaacatggtgccccttccgcatgaagtcaccggtccggataatgacttaaatgactttattgagacgtacatgcaaaaagccaaatcagaaaaagccaccgtctatatttacggctctaaattcgggccggagccgggcgctgataagattttcgggttcaagccgacaaacggcatgcataatattcatatgaatcagggaaacccaattgatacacgctggaagaaggataacggaacgtggcacgacggcggtattttaatccagtttgcagaccagtgggccgcggtctttttggcttttctgtctcagtcatggtgcacggatgaagaaggccacccttatacattttgtgatcatacacagcttaacggctgatgtccgcataaaaagcctgccgaaataacggcaggcttttcttattacattttagcagcttcggtccgcttcaggctttccggcctcatatcacgccagtttgtttcaatatattcgagacaaacggggcgggtttcattcgtcaggcgggtttcccagccgtccggcacatccagataggccggccacagtgagtactggccttcagcattgacgagcacatggtatgaaccgtcttcccgttcaaatggatttgtcatatcatctctttcctttctttaccggactgtacgccgtccgtttaatttctctgccagaatcgcgccgatgtcggcaagcgggcccggctggcacatatctttatggcggcagtctaagtcataccgctcgattttcccagtaatatacggtttccaagtatccggctcgatcgggtcaaaccactccggaataatcgtggatctgaagaacagcacatctccgtggaacggctttggcttgtatgttcctaacagcccgacagaatttacgtacgtgtctttcagattcatcatcactgactcgtccaggctggctaatgcgcttccctcacggcggagaatggtcagcgcggtgtcaaaatcaagcggctgatccccgaggctgtccgggtcgtaccctcccagggcaagcagcgcaatgacggcttcctcgtcatcaggcgcattttttatcggcagaaaatgattcggatacgcgtcaagcatcaccaaaagcgaaacctcttcgccccggctctgtaattgtgtcgccatggcctgaatgacattccctccgagagaccagccgagcagacggtacggccctttcggctgcacggtgcggattttttcaatataatcagccgccatgtcatctaagctttgcggaagcggttctttttttccgatgcctctcgcctgtaagccgtatatcggataatcagcttctaaagaagacatcagcccggcataacaccagctgagaccgccggccggatggacacagaacaacggtgtttcttctcctgccgttctgagcggaagaagaacatcaagcgcgcttgtgcccgttcctgactcaagtctttcagcaaggcttgccaccgtaggagcttcaaatagtgttccgatactgagctcggctcccatcgcttcccgaatacggctcattaaatgaaccgcaagcaaagaatggccgcctaaatcaaaaaatctgtcatcaataccgacacgcggcagatgaagcacctctgcgaacagctcacacagcatttcttcctgcggcgttctcggtccccggccggtgacctccgtttggaagtcaggcgcagggagcgcttttcggtcaagctttccattcggtgtcagcggcagttcattcatttggacaaaagctgatggaatcatgtaatccggcaggctttcttcggcaaaccggcgcatgtcccccgtgtccaaggtgctgccggcagatcggacaaggtaggcggccagccgtttatctcccggccggtcttcacggacgactgcggcggcatcctcgacatccggatgtttgacgagaaccgcttcgatttcccccaattcaatccggaagccgcggattttaatctggtggtccgccctgcccatataatcaagagaaccgtccgtccgcaggcgggctaaatcccccgtccggtacattctcgttcccggcgggccgtacggatcagccacaaagcgttcggcggtcaggctttgccgccctaagtagcctcgtgccacgccccctccggcaacatacatttcgcccgtgatccccggaggcacaggctccagccggtcatcaagcacatatacgttcagatcaggaatgccgcagccgatgaggctgtttgctctcagttcggcaatgtttttgtctaattcaaggtaactgacgtgcaccgtcgtttccgtaatgccgtacatattcacgagcaccggctgattgtccgcgtggcggctgtaccaatcctcaagccggctcagctcaagcgcctcgccgccgaagatgatatatctgagtgcgagctgatgccccagctctttgtgttctttttccgcatgcatcagctggtaaaacgctgacggcgtttggttaagtacggtcactcgctctttcacgagaagatgcagaaacgcttccggggatctgctgatgtcatgcggcacgacgacgagacgtccgccgtggagcagcggcccccatatttcccagacagagaaatcaaaagcgtaggagtgaaacatcgtccatacatcatcagaattaaagtgataccaatgccgcgtcgactcaaacagccggataacattgctgtgcggaatgatgacacctttcggcacacctgttgatcccgacgtgtaaatgacataggccgggtgaagcggtctcagcggacgaatccggtcggcattctcagggttcgtgacggcatattgccgaagtgtttccttattctgcggatcatccaggatgaaggccggcatgccgttttcgccagagagcttacttgcgccttcacggttggtgagcataaatacaggcttggcatcatgtaacataaaagcgatgcggtccgcgggataatcaggatcaagcggcaaatacgctgcccccgtcttcaggacggctaacagcccgacaatcatatctaaagaacgcggcagcgccagtgcgacaaactgctccgggccgacgccgcgggcaatcatcatgtgcgcgagctgattggctcttttattcagctcttgataagtgagtccgctctcttcaaatactgccgccgtttcatccgattttgcggcggcctgtatttcaaacagttcaggcagtgtctgccgaggctgaatatgctgttttgcccgtttaaccggcaaaagcttccggcgctcttcatcagaaagaatggttaagcttccgatcggtttatccggatgtgatacggcatcttcgagcagaagaagcaggcgtccggcaagtgcttcagccgtttcttttctgaataagtccgtactgaactccagcaggccttcaataccggcaggcgtgccgtcatcatggcgctgttcagccaattccaatgtcaaatcaaatttggacgatccgacactgctgatttgcaggcttgtttccatatcaggaagactgagtacagggtcaggcgtattttggaatgcgagcatcacttggaacagcggatgtcttgaccgggagcgaaccggattcaattcttccacgagacgttcaaacggcacgtcctgatgttcatatgctgcgagattcatttccctgaccctttcaagaagctcacaaaagctcggatcgccagaggtatcggttctcagtacgagtgtattaatgaacatacccacaaggtctcctaatgcgtcatcactgcggccggctatcggactgccgatcggaatatcggttcccgccccgagccgggtcagcagtgcggaaagccctgattgaagcaccataaacaggcttacgcgctgatttctggcaagtgagagaagacgggcatgaagctcttggccgatgttgaccggaatgacgccgcccctgtagcttgattcagcgggacgcggaaaatcagacggcagctccagctgatccggtacattttcaagcgttttcttccagaaatccagctggcgcgcaattaagctctcagaatcagacgcgctgcctaaaagctgctgctgccaaagcgcataatccgcatattgaaccgccagcggcgcccattctgctttttcacctgtttgccgggcgatataggctatggataagtcacgcatgagcggattcaaggaccagccgtcgcctgcgatgtgatgcaggagaaccatcagcgtatattcgccgtcaccaagatcaaacagctcagcccggacggccggctctttagcgagatcaaaccgatatcttgccgcagcggcaagcatgtcttggagctcgtttttgtctgcacgtgtcactgtaaacacagggcgggcttcttcagcaggtaaaataagctgatgagatgatcccttattttccggaaaaacggtgcgcaggctttcatgacggctgacaacatcgtaaaaggcgtgtttcagcgctgattggtcaagcttgcctgacatgcggacaatcaccggaatgttgtaagtcgggctcggcccttcaagacagtagagaaaccaaagacgcagctgcgcaaatgacagcgggatgtgctccggccggtcaaacggcttgagcttaggccgcgcactctttgcggtgtcaagctgtgcggcgagcccggcaacggtcggggtatcaaacagacgtccgatgccaagctctgcgcccatcgtctcccggatccggctcatcaggcgtccggctaagagcgaatgtccgcccaattcaaagaacccgtcatcaattccgacccgcgcgagaccgagaacctcggcaaacagatcgcataatatttcttcctgcggcgtccgcggccctctgtcagacaggacagctgaaaaatcaggtgcaggcagagcgctgcgatcgagcttcttattcggcgtcagcggcaattctttcagctgtacaaacgcgcccggcaccatataatccggcaggctttcgcccatatattcacgaagtccgccgatatcaaggggctgatccgcgacagcataagccgccaggcgcttatctcccggctggtcttcacggacaataacagcggcctgcgaaatacccgggtatttcgacagcactgactcaatttctcctaattctatccggaacccgcggattttaatttggtgatcggctctgctgatataatcaagcgagccgtcctcacgccagcgcacgagatctcccgtccggtacatcctcgcgcccgcgggcccgtacggatcggcaataaatctttcagctgttaaatcaggacggttataataacctctggcaagcccctcgcccgctatataaagctcgcccgcaattcccggcgggactggctgcaatgcggcgtccagcacgtatacccgcgtgttccaaatcggctttccgatcggaggcgcccctgtatggtcttttgcaagcggctgtgcggccgaccagattgttgtttcagtcggcccgtacagattcgtcaccgtacagcctgattcaagcagagcatgcataagcgcgttcggaagcgcctcacctccgacaagcacctgcagcgcccggagggaatcaggttcattggtgactaatgaatgccacaatgtcggcgttgcctgcatgattgaaataccgtatgagtgaatcatgttcgcaagcgcccgcggttcctgaatcgtctctttacgtgcgatgacgcaccccgccccgctgatgagcggaaggaagagctcaagtccggaaatatcaaacgccgcagtcgtaacggcaagcaggcggtcttgtgcgccgagcgggaacatttcccgcatggataagaggaaattgcttacgctttttaatgtcacgactacgcctttcggtttgcccgttgaacccgatgtatatatgacataagcggggtgcaaaggcgaacattccgcctgatcggaacagtcagcattttgagcggcaacggtttttaccgtatccgggtcatcgagaatgatcctttttgcatcactgtcttccggcatgcggccggataattccatcgttgtaatcaggcatgcagggtgtgcatctttgagcatgtatgtgatccgctcagaaggaaaatcaggatcaagcggcaggtatgcggctcccgttttcaaaacggccagcatgctcacggccaactcctgtgaccgcggaagcagcaaagcggcaaattgttccggtccgagccccttttcctttagcatgccggcaagctggttcgcgcgcttgttcaattcggcatagctgagctcttcgttttcggtgatgattgccggccggtccggtgtttttacggcctgttcgtaaaacagctccggcagacttttctgcttctcggccttgcgcgtgtcattccagctttccagtacgcagagacgttcactttcaggcagaaggttgagtgtgccgattttttgtgtctggtctttcacagcggattccagcagaagcaggaatcgtttttgatggttttcaatatcttcggcgctgtacacttccggattcgcatcaaagtccacacgcattccgcttccgtccgctctgtcgtaaacgttaattgacaaatcatcaacgggcccggctgataagttatggacggtgcctggcgctcctgcgaaatcaagagcgtagtcaaacggcatcacattgacttgcgggccgaacagcctgcggttttctccgagcaatttaagatcgcggcgcatgtcttcatggcggtatttctgatggcgccggatgtttcggatttcttttgccacttggctgacggcctcatgaaaattcatatccgggcggagagaaagccgtaaaggcagaagattcatgaccatactcggaatattcagtgaaatcgagccgatccgtcccatcatcggtaaaccgagcacgatatcccctgcgtttgtcatccggtggacatataccgccgctgcagctgtgacggcttcatgccagttcggaattgcttttacatgctgcaaagccgtttcagaaagataagccgtgcttctccgaaagcttgttgacgttctcggcgctctttctgccaaactgacgacatcaggttcatccgcaaatttctccatccaaaattcccgatctttcaggaattgatcagacgcgcggtattcttgatcttcttttaccagttcctccaaagagccgaaggagcgcccgttatccggacgtccttcccgtattgcggtgtatatttgcgccgtacgccgtgccagcagtgaaaaaccgtagccgtctatcgcaatgtggtgaatgcgctgataccagaaaaagcgttccggtcccgcctgaaataaaatgtcgcggaacaaaggcccggccgccatatcaacgggctcagccaaatctgtctgcatgagtctgagtgcggcctgcttcggatcagcttctgaactcacatctatgacatcgatcgcagcttcaaatggaggattgatgatctgcttcggcccgtctgctccctcttcgaagcgggcgtgtaatgacacggcttccgtcagcacacgttcgagagctgttttaaatatgttcacatcgatcgcgccgtttatctcaacatactcgcctgtattgtaaatcgcattatcaggatcaagctgctgcgcaaaccagataccggcctgtgcgcctgtcagaggcagctgttgtgtatcatgcattctattctctccctttataaataatctgcgttcggcaagactttttgagatcgggaagaaagaagtctccaccactcttcaagcgtcgggttctccgccagttcaacaaacgtcacttcagctccgtcacggcgccattgttcgacaaggctcatgattctgacggaatcaaggcctctgtccagcaggtcttcatgatccggaatatcagacggtgattcttgaagaatcgccgcaatttgttcccgcacccggtcttttgtcaatacggcggaagtcttcccttctccttcagaaaccggcgcgccgcccagcagctccagcacttcgtttgtcaaagccgtgtaagcgcagcgctgagacgcatattcgatggccatcttatgtttttctgaagaaaaatcagcaacggcgtctccgataaagaagctttggatatcatccataaatgcttcacaggctgtgacgagacagccgatgtgtgcataaattcccgtaatcatgagctggtctctgccgctttcacgcatgatgtcaaggagattcgtccgtttaaacgcgctgtatctccactttgtgaggacaatgtcctgatcatccggggcaagctccggaatgaccttttcttcataaggcccgcttttcagccccggtccccaaaaatccgtcagcagcgcgcggtccgccgggtcttggctgcccggctgcgcggtgtacaccaccggaatgccgagcgctttgcattgctcttttattttcttgatattctgagccgcctccgtgatcggagccttccctttctcaaaagcatcgacgaaataattctgcatgtcatggatcagaagcaccgcgcgtttcgggttcagcgtccacgatactttattttcaggcatatctgacgctgtcggcagcgcatatgcgggaattgacggtatagccaatgtaaacacttccttttttaagattgtttgatttcagcaggcttcaatttttgggcgatcgtttcgcgaaggtcctttttgctgaccttgccgacgccggttttcgggaaagaagcgataaattcaacccggtcgggaattttatatgccgccagcccgcgctcccgtaaaaacgctttcagctctcccggtttcggcgcttctcctttcggaatgacgaacacacaggaccgctctccgagaaaatcatccggcattgaaaccatggccgcatcatgaacggcaggatgggccagaaggtgattttccacctcttcagcggcaatcttttcgccgccccgattgatttgatctttcgcacgtccttcaacgatgatatagccgtccgccgtcagtttgacgatatcgccggtctgataaaatccgtcggctgtgaatgatctttcattatgttcaggcgctttataatacccgcgaatcgtgtaagggccgcgtgtaaacaaatgtcccgcttctccgggggcgacatcccgcccgtcatcgtctaaaacccttacctcatcaaaaggtgacatcggtctgccttgcgtattgacaatgatctcttcaggatcatccagtctcgtataattcaccaatccttccgccattccgaaaacctgctgaagggtgcatccgaaagcgctctttacgcggcgggccgcctcagcactgaatttggcgcctcccacctgcagcacttgaaggcttgataaatcatcacttcgcgaaccggatgcgtccatccacaccatcgcaagcggcgggacgagcgctgtaatcgtgacacgttctttttcaattaacgggaagcagtcatccggactcggcgtcggtgacagaacaacacggcctccggcatataaagttcccagcacacccggcgagctgagcggataattatgcgctgtcggcagagcggccaaataaacgctgtgatgatccaagccgcatatttccgcgctgaggcgcaaactgtatatgtaatcgtcgtgtgttcgcggaatcagcttggacagccccgtactgcctcctgaaagctgtaaaaaagcgacttccgccgggcttacctcttccagctgaacaggctctctatgcaggctgctcagttcctgaaactcttcagcttcgccggccacaatgacatgcgccaaatccggaagtttgtctttcacctgtctggcaagcgccctgtaatcaaaacctgaatgcgtatcaggaatgatgtatgctttcgcctctgcaaactcgcagaaatacgtaatctcactgcttctatgagaaggcagcgcgaaaacgggcagtgctccgagtcggaacagcgcgaaaatcacttcaaaaaactcagcgatattcggcagctgaacgacaacgcggtcttccttttgaattccgagcttatgcagccccgccgctaaacgatcggccctttcatctaattctttgtaggtccaatgtacatctttacacgtcacggcagtttgatttccgtataaagccgcgcgctctttcagcattcctccgaacgtctcacccttccagcagccgtcttttcggtatttttcagcccattcttccggccatggcgtaaatccagtcagcacgatccgttccctccttttttacaactcatcttggtaaagccccatcgcccggagcatggtgcggaatttcgccgatgtctcgtccagttcatcctgcggctttgatccggcgacaatcccggcacccgcaaagagccggagagaccttgtttccgcttcggcgcagcgaagtgcgataatccattctccgtcaccttcagcatcacaccagcccgccattcccgtgtagaaattgcggtcaaacggctctatatcctgaatcgcttctctcgccgcatccgtcggcgttccgcatacagcgggcgtcggatgaagagcgatggccagctcaagcgatgtcgttgacggatcactaagctctccctttacctcggtggacaggtgccacatcgcctcagttttaatgagtgacggtttttccggcacatcaagcacacggcagaacggttttagggcggcggccacggcggccacgactacggcatgttcatgcagatcttttgctgattgcagcagttcttccgctcttctctgatcctcggcgggatctgtgctgcgaggtctggaacctgccagcggattggacagaatcgatgttccgtttttggacagcagcagttcaggacttgcgccgaaaagcgtttttcttgtttctgacgttcccgtcacatccgaagcgaatgtatagccgcgcgggttgtgctgcgccaaatgcttgacggcctgaggaatgtcgatatccttttcagcggtcagatgaagcgtccttgacagcacgattttgctgagcgggccgtccgtaatgttgaatacgccttgttccacaccgctcataaagccctcaggctccggaacgggacggatgtcatatgtattggattgcggcttttctgcggaagattccgcaaacgaaagcgggcctgccgtatggacattcttcggtacaaaaagccgggaagcttttctgccgtcaaaaggaatggcgccggccgcaatcggatgtttgatgccggcttgctttgcctcaagaagcgtctgtcttacgcgttcaggcagtgaatccagctgattctccgcgtctgcatccggcacttttgcaaacacaccttctgcaaggagcgtccttttcggggaagctaaaaagaacgctccgggcttgtaagcgtccagcacctcttttgcagacacttccgtcaatacatgttgatttgtcatgtttgtccctccttctcgttaaatcaaacgcctaaagtagcgccgccatccacgcataaatcatgcatcgtgatatggcttgcctgttcagaggccagaaacaaaacggcatttgcaatatcagaaggctttgccagcttttgaagcggaattcccgttttatatgtatcaagcgaacctctgataacgtcctgtgctccgttttcatcccgccacagcgcccgctgcatgtcggtttccgttgaacccggagatacgatgttgcagcggatatgatgggccgcaagctccagtccgaggcatttcgtaaacatggcggcagccgcttttgacgccgcataagccgccatggaagcacgcggaacgccggctgcattcgaaccgaccgtaacgatggcgcctttttgacgctcaatcatgtaccggcttacagcccgcgatacatgaaatacgccggtcgtattaacagaaaatgtttgatcccaatcttcatcactaagggattgcaccggacccggccgcagcacgcccgcaacgttcgccaatatttcaataggccccatgtcacgttcaacggcagcgatgatatcattgacagccgcactgtcagatacatctgcggcaaacccctgcgcctgcacgcctttttgccgaagtctgtcagttagcccgggaagcaggtcttcatttgtatctatagctgccacatttacgccttgttcagcaagggcaagcgctgttgcttctccgatgccttgagcggcgccggtgacaacggccgttttccctttcattcccaatgcgtccatattatcattccctttctatattgataatgattatcattatcaattatgattcaagacaatcatatccaaatcaaaacacgcagtcaattagaaaattagaatcagccgcatttagttcgaagggcctgttttttctcatgtgggagaatacggggtatgcggccctcccggattcaggcagaaacgcagggctctgctgattaaaacgggcaggacagaaatatggccctctccttcaaactcgctgtattcagcacggactccatcatcttcaaatccggataataaagagtacagcgcctctgcgtgctgcgggattctgcttttatgtgttttttcaatttctcccgcagccagcaatacactgacttgaagattttccgcagagagccggtctgacaaacgttctgcgttttcctgaataaaacgcttgttccaatgaattgacggacttcccgcaacataggtctggaacatgtccggcctcgtcaaaagcacttgcagcacaaaaagaccgcccagcgaatggccgaaaatcgtctgcctgtctctgtcgatcggataatcccgctccatcgcgggctttacttcttcttctataaactccagaaacgcttccgcccctccctgttcgggccatgccgcgccgcgcggatgcaccggcagttctgattcagaaagcggcatcgtaaaatcactgtgccgttcggcggaaaacggctgatctgtcgggtagccgattccgacaatcaccgccggaacaacgcctgttttttcaggccgccggctttgcacccgcaaagcttcggccattgtaccgaacacggaatttgcatcaagcaggtagatgacggggaagccggaggcaggcggttcttcctgaggaaaagagacaaagatacgatacgtacggcctccttttgagcgcatttctcttacttctgtgcccggaaccgcgtatcggccggccggcgcgaacccccggtttatttgttttccgtccattatgtgttcatcccctttgtggcaattactttatctatcctcattgataatgattttcaatatcaaaagacacctcaaataataggttttttgccaaacaaagtcaatggatttttgatataaaaaaagcaccttattttaataaggtacctaagaactatatagggataggggcttaatcccatgtaaagcgctcattcttccatggatctcccctcatatggtagccgtttttctcccaaaagccggggtggttttcctttgtaaactgaatgccgcgcagccattttgcgcttttccagaaataaagatgggggaaaacgcctctgagcggatagccgtgctctggcgttaacggctcgccgttatgcgcatatgccagcagggatgtttcccgcgtaaaatcagaaagcggcaggttggccgtccagccctcttcagcgtgcagaatgacgaatcccgcttctttgtgcacacccgctttctcagcgatgtctttggcgcgtattccctgccagatattatcaagacgggaccagcccgtgacgcaatgaatatcatttttcacttcggcttccggaaaggctttgatatctttaaagcttaacagcataggacggtcaacaagcccgtacacttgcagattccattttgacatatcttcataataaggaacatttccggcgtgaagcacgggaaacttcgttgtgacattttgatttggcggaatccgttccgactgttttgtttgtttcgttttcccgaaaaacatatggctccctccatttagtaaacctgtattaaatctttgttgacaatcaatcacccttcgattacgctaatctggtacaagtgtaagggggaaaaacaaatgacacaacgcaaccttcgcgcgggcgatatggcgctgatcggcatgtttgccgccctgatggccgtcggcgccaacattacatcaatggctccttttttgcaagttgcgggaattccgttatcgctgcagcctttcttttgtctgttagccgcgatgcttctcggcgccagacgggcagccattgcaatgacggtatacgcattggccggactcgcgggggcgcctgttttcgctcaattctcagcaggctttgcgccgtttatcggaaagagcggcgggtttattctcgcttacatcccggcggcatttgcagccggatggctgctggaaaaaacaaaaaaacccggccgcctgcattatgcatgggcctctttgatcggtaccgccgtcatttatatcattggcacgacctatacgtatattgcgctgaaattatggcttcatgctccgatcagctacggaatggcctggttttacatgatatggtttttcataaaagatatcgttttagcactgttattggcatcaatcgcgcctgccgtatacaggtctattcataaagcgacggggttcagcagaaatccggcgtaagatgttctcagcatacaaaaaggctcccctttccgggagcctttttttacaggacaagcgcggcaatccagccgaatatcacaagcggaatgttatagaaaataaatgtcggtacgcacgtatcccaaatgtggtggtgctgtccgtcggcgctgaggcctgacgtcggcccgagcgtactgtcacttgcaggagaacccgcatcaccgaccgcggcggccgctccgattacggcgatcgtcgccatcgggctgaatccgagctgagcgcacagcgggacaaatatggtcgtaatgacgggtacggttgcaaatgatgatccgattcccatcgtgattaataaaccgaccaccagcatcaggagcgcgcctaatgattgactgtgaccgataaagcctgttgatgctttgaccaaggaagccacatcgcccgttttgttcaatacatttgaaaaaccggccgcaacaagcatgacaaacccgataaaagccatcagaatcatgccgtccgtgatcagcttatccgcttcattgcgcttcatgactccgctgataaacagcgtaaacaagccggcaagcgcgcccatgatcataccttccactccgagcacttgtgacagatagagctgaacggcaagcgacacggcaatggagatcagggcgatggcaatgctttttttcgtataaggagaagacgacagtccggcaatctccttcgtctcatatttcttcggtttccggaagacgatgacggataaaattaaaccgactaccatcccggccgtcgggatgattaaagcatacggaatatcactgagcggcacctttaaaccggctgacgccatattatctctcagcatcccctggaaaatctgtccgaatccgacaggcagaacgatatacggcgcagtcagtccgaatgtcatcacacacgcgatcagcctgcggtctatttcaagttcgttaaatatttttaaaagcggcggaatcaatacaggaataaacgcaatgtgaacgggcaccacgttttgcgagaaacaggatatgattaaaataaccagtacgattaacacttttgacagtgcttttttccgcgaatcttccttttttccgattagtttgacagacgcttccaccattgcatcgggaagccccgtcttcgtcagcgccgcggcaaatgctccgagcagcgcgtagctgaccgcgacggtggcatttccgccgagaccgtccgtaaaagccttcaccgtctctccgaggcctaagccgccggtcagcccgccggcaagcgcgccgatcattaaagctataataatattgacacgcagcaggcttaagacgagcataagcaatactgcgacaacaacagcattcattgatgagtccctccaaaaatcctttagtttgctaatgtagtagataattaaagttaacatacattctgcgctttagtcaactaaagattttggaaatcaaaaaacccgctgcatcaaggcagcgggatgctgttatctttcgggcgtaaaccgctcagtcaaaacagccaacgtccttgccatgacgcctgttgcgccggcagggccgaagcatgtcgctttattcgccgtcgcggttcccgcaatatcgagatgaacccacggcgtgttttccgcgaattcaccaaggaatgcccccgccataatcgcgtggccttctcttcccggagaattgttcaaatcagccatctgactgtttctcacccgttttttatccttttctgtaatcggaagctgccagatcggctcgccggattctttcgccgattccgccacctgttcataaaacgcggcgtgattggtcatggcgcccgtcatttcgttacctaaggcgacaatgacaccgcccgttaacgttgcgacgtctacaaggacagaggctccgtgctgcttggcgtatgtgatgccgtcggcaagcacgagacgcccttccgcatcggtgttcaggatctcaatggtttttccgctgagcgaaacgatgacgtcatccggcttcatagcatcggacgaaatcatgttgtccgtagacggtatgacggcgagcacgttttgttcaggccggagttcgccgataatttccattgcgcccaataccgaggcggcccctcccatatcgcttttcatgccgacgatgccggttttcggcttaattgaatatccgcccgtatcaaaggtaattcctttaccgaccaggccgatgacgtcttcccactgatctttgccctgatacttcagaacgatcattttcggcggttcggatgagcctttgttaacggcaagcagcccgcccatgccgagctcttccatttcatctttttctaaaatttcacactcgaaatcgtattttgccgcaagctcagcggcatatgacgccaaatcagtggccgtcagcatattacccggcatattcacaagcgtgcgggctgaattcgtcccttggccgtatgccgcgccgacgttcaggccggcctgcacttccctcaggtcttcttcggtcacggcgcagactgatttcagttcctgatccggctcattcgatttatgtttataatcctgcacctcataaaccgcaagcagacagctttccgaaagcgcatgagcggcatcggcggcaggcacttccccggagacgaatgtatcgagcaacacggatacttcctgttttttatcttgatgaatctgctgaaatactcgtgcaaagcattctttcgtatcttcaaacgaataatccgcttctcttcccaggccgataaaataaatacgtttcataccggtcgcagccggagggtatacttttgatacacgattgcgtttggcggacacatcaccatcctttaacagctgggtcagatgaccgtctaatttatcatccaattccttcgtaaatccgttcagcgtgcttttttgaaaaagaccgatgaccagtgtttcgggatgccgcagttgatcagatgcataaaacatgagtacacactccttatgtgggtatttgttatgtaaagtggtataatgaaaaaacatttttcattgattttattttaccaaactaagggcgttttctgcagtttttcgatacgatcggaatcagcagatacagaaaggatgtcgcatatggatgtacttatgaattttcctttactggcgagttttgccgccattatttttgcccaagttgtaaaagtgcctattcaatttatcgtatccaaaaaacttgactggtctcttgtgacgagcaccggcggcatgccgagctcccattccgccgccgtcaccgcgctgtcaaccggaatcgctttggaacagggactggactcgcccctgtttgcagtcgccgcgattttcgccgtcattacgatgttcgatgctacaggtgtcaggcggcatgcgggtgaacaggcgacagtcattaataaactggtcatcgactttaatcggtttgtcagcgaagcgaaggactttcagaaagcggaagagaaagaaaaacagaagaaactgaaagaactgctcggccatcagccgattgaagtgttcttcggcggcgtcaccggtattgtgctgacattgattttagattatttctttatgtaaaaacgcttcagcggatgctgaagcgtttttattcttttaccgttttgtattgatttctgaacacttgcagcgactttgtttcgttcagctttacaagttcgtcctcggtcactgtgccgttcccttttttaataatgtagacctcaagtgtttttttgccccaattgttatagacgtccttgacggtgtcaaagtagaggtcaaggcggctgcctttaatttttgagccggtatcggcgacaaccccgtaaccgtaattcggtataaacagaatcgtcccgatcgggaaaacagacggatcggccgcaacagttgaatataaatcgcgtttgaccttcacacctgaatatgtaattccgtactgcggatgacccggagattttccggtagattccgctccggcggtataaccggtggccgtcactttttgtgacggatagcgttcccagtcaaaagcttcttccagcggctttaccctgcctgatgccttcttttccggctgattctgtaaggattgaaacggagtgccgatgtttttcaaaacggcgccgcgatgttccgtcatccaatttgtcagatcctttgcttcaacaccggttatagaaaagtatgtcgcatggcatgcgcccaaaaagagcacgatcatgaatacgcgtctgattatcgtcaatctgaaatcactctcctccgagtcattgttcccaactcggtgaggtgctatacaaaaagcgccgtgacacaaaaaaagctttcttgaataagaaagcggtttaaaacatttgatatcctctttttctgagcgcctttatggcaatgcctgacatgatggctcccgccagtccgcccgccaaaatcacgacatccgcaaccgctaatgacatgatgcgctgaaacaggctttgaaaggattcccccggcgcctgcacgtaactgatcatctttttattgctgataatgaaaaggcatacaatcggatagacaacagccataatccacgacattctaagcagcatgttcaacagaaagcctatgccgaaaaacagtacaaaaaatagtacgattgagatcaggacaaccggcaaactaatcacaaacatccaccccctacagcactttcagtgtacctcgggggcggtaaaaaagtcaacgtctggaaaaatcagcgtctctctttgccgcttccctggcaggagggacatgtttcggagccgccaagaagcaattgaaaataccctttacctgagcagaacggacacgccgccgtgctttttgctgtcgttttcatgcggatcaccctttttcttaattttctgataatatatcatatttacttgtcaagcaccaagtcagaatatgtaacataacaactcatgtaagcggaaacattcttttttttcttttacatgctttttatagcgctcttttttaaaagaagagaaaacccgcggctgcgggttttcagaagaatttaaacttcccttttttcagcgtcaggcccagcccgccgatcataaagagcgagcggttatcaatgacctttttcataaaggacgccggcgtgcctttaagcttcctgccgtatacgactccgacggcgttatgctcaccgagggaggcgaccgttcctttaatgtcaggcttgaactcttcaagctggcctccttttatcaaaccgcccagatttttggcgaccgtttctccttgctgcatcgcgatctgagcagtcggcgggtacggccgttccgtctcttcattgataaagagcgagctgtcgccgagaataaaaacgtcatcatgtcccggcgcccgaagatcagggttgactttgacacggccgcgcatattttcaaaacccgcttcctccacgatcggatgtccgcgcacacccgcggcccagacaacggtctgcgatttgatttcttccggctcttcatctttcttgccgactgtgacaccgtctgcgcggcattcttgaaccgcggtgccgattttaaattcaacgcctttgctctcaaggtattgaacggcgtaatcgacaagctccggatcaaatcccggcaaaaccgtcggggcggcctcgacacagacgatccggacgagactttcatctatatcataatatctgcataactccggcttgcggttcgcaagttcaccgagaaattcaattcccgtaaagcccgctccgccgacaacgatggttaagcggtcagggcgtttttcggcctccgtattgtatgtcgcaaattggagctcaatatggtctttcagctggcgcgacgtattaatattcgcgatcggaaaagcgaattcttttaaacctttaatcccgaatgtttcagggacggcgccaagcccgatgacgagataatcataagggatgtccccttgtgaaagcgtcacctttttattttgcacatctatcgcttttacggtatcctgcacaaatttgacccgtgattcattgattacatcttttatttgatatctgcagcggtcatgatgcagcgttcctgcgctcgcttcatgcatccatgtcgtttcataatgataattgtgtttattgaccaaagtaatgtcggcgtcatttgccccgatatgcttcggaagccttgttactgtcattaatccaccataacctgcacctaaaaccacgattttgggtttattcaatgccatcacatccaccttcttttttttgctgttagacgcataatcaaatcaacatttgtattagcttcagcttattggcgggattttatgaaatgaaatataaaattttttagaaaaccgcacatgtctgcatatcaccatactatccggaagaatcggaaaacattcaggaaaaaacagattggaatttgtccccatcttagcggcggccgcaatttttttcaagaatgaagcggccgggcggttttcggcactcgtcatcctttcaaattgtatgttataattaataacaattttcaattaggaggcaatttggtatgcaagaggattcaaaggtttatgatattacggtcatcggcggcggtccggtcggcctgtttaccgctttttacgggggaatgagacaggcgagcgtcaaaatcatcgagagcctgcctcagcttggcggccagctcagcgcgctgtaccctgaaaaatatatttatgatgtagccggattcccgaaaatccgcgcccaggaacttgtgaacaacttaaaagagcaaatggcaaagttcgatcagaccatctgcttagagcaggccgttgaatctgttgaaaaacaggcggacggtgtgtttaagcttgtcacgaattcagaaacgcattattcaaaaacggtcattatcaccgcgggaaacggcgcatttaagccgagaaagcttgagctggaatcagcggaacaatatgaaggcaaaaacctgcactacttcattgacgacctcaatcaattcgcaggcagacgcgttgccgttctgggcggcggcgattccgctgttgactgggcgctcatgcttgagccgattgccaaagaagtcagcatcatccaccgccgtgataaattccgcgcgcatgagcacagtgtcgaaaacctgcataattctaaagtcaacgtgctgacaccgtttgttcccgctgaacttgtcggtgaagaccggatcgaacagctcgttctcgaagaagtgaaaggcgaccgtaaagaaatcattgaaattgatgacctgatcgtaaactacggctttgtttcttctctcggcccgattaaaaactggggtcttgatatcgagaaaaattccatcgtcgtcaaaagcacgatggaaacgaatattgaaggcttctttgccgccggagatatctgcacatatgaaggcaaagtcaagctgatcgccagcggtttcggcgaagctccgacagccgtgaacaacgcgaaggcttacatggacccgaaagcgcgcgtccagccactgcattctacaagcatgtttgaaaaataatataaaaaagagtctgtgtcataccggcacagactcttttttatttaaacatccaaatataattcatgacggttccgacaacgagcgcaatgacaagcgccgacacgacccaaatcgtgcctaaaataatccggtcctgaattttctgggctttcgggctgtgcccgggctgtttttgttccataccggcccctcccttcttctgcaaatctatctatcgtaacaaatgtcttacaacaaccaatactactatgataaccaaactgcaaatggatgacaagctgaccgcatatgaggcagcatgaaatcatttgacattcctgacaaaacaaagtacattataaaaagacgaacattttaattttatttaaatatattattcgcttttaggggtgttatatatggaaaatgtatttgattacgaagatattcagctgattcctgcaaaatgcattgttgaaagccgatctgaatgtgatacatcagttacgttgggcggacacacgtttaaacttccggtcgtaccggccaacatgcagacgattatagatgaaaacatcgcggcctggctcgcggaaaacgggtatttttatatcatgcaccgcttcgagccggaaaaacgtctggcttttgtccgggatatgaaagcgcgcggactgatttcttccatcagtgtcggcgtgaaggaaaatgactatgaattcatccgggagctgaaagaacaggagctggtgccggattatattaccattgatatcgcgcacggccattccaatgccgtgatcagcatgattgaatttattaaagaacatgtcccggaaagctttgtcattgcagggaatgtcgggacgcctgaagccgtaagggagctggaacgcgcgggcgctgacgcgacaaaagtgggaatcggccccgggaaagtctgcatcacaaaaattaaaaccggcttcggaaccggcgggtggcaattagccgcgcttcgctggtgcgcaaaagcggcgagcaaaccgatcattgctgacggcggcatccgcacgcacggcgatatcgcgaaatccatccgattcggcgcgtctatggtcatgatcggatcattattcgccggccacgaagaatcaccgggacaaacgatcgaaatcgacggaaagctgtacaaagaatatttcggctccgcttctgaatttcaaaaaggcgaaaagaaaaacgtcgagggcaaaaaaatgcatgtcgaacataaagggtctttgcaggacacgctggttgaaatggagcaggatctgcaatcttccatctcttacgccggcggcaatacactcgaagccatccgtaatgtcgactatgtaatcgtaaaaaactctattttcaacggcgacagattttaacatgcagcagagccgctcgaagataaaaaaaatgacattcatattgaatgtcatttttttattaaataccgaaataaagagccgcactggctaacagattaatcacaaaaataaacaaaaagatgtaacgaatgaatttattttgcaccggagcaaatataaagagatatagtcctgccaccccaaaagtaagaacaggaaacagccactcaaaggataaagaaatgatataaccgataatcataacaatcggcacaccgattaatgataatttacttctcatatgatttctgccccttttacttaaaaattggtgtgatgtaagcttcaataacggcagcggcgatcagcagacaaataataagcagcaccaatattccaatatgcctgaacattgaaaccattatctttttttccttagaaaaacacagcctgatgaccaattcaacgcccttaaaaccaatggcgccacttaataataacgcaggaacttcaaatataccatgaggaattagcagtaaaaaaatctgataaaaaggaaccccgctatgcagattttctataatagagccgcttaaaataaacccgttggtgaataaataaaagattgaggtcaacccaaaggtaaaaaaacccgcggctaaaaacagacaagcgattgcattgtttttcagcagttcaaccgcgcctgacgagccgttgtaagacgctgatgaaacaaagtgatcggaaaaaaacgcagcgatcacaccgcctgaaaaaaacagcactgacgcggttaacggaatggcggacgttctgattgccggcaacatgcggttcatcatgtatagatacgctcagccaattcttcaatctcttctaatgaatgctcggatgactgatactccgccgcaaaaacgccttcatgtataataccgatcgtatcgcacagcgaatgcgccagctccagcaggtgagtcgataacaggactgtatttccctgcttgacgtactcctttaataacgtccgtatcgttttaccgctgattaaatcaatgcccgtcagcggctcgtcaagaattaatatctttggctgatgaatgagcgctgccgcaattgataatttttgtttcattccatgtgaataagttttaatcagctgatttccgtcttgagaaagcttcagcgtctccaacatattctttatataatcatttgtccgctgagacggaacttgaaacatttccgctgtaaaacgcaagtattcgactcccgttaagtaatcatataaaaaagcatggtcgggcacaaaaccgatatcagccgatatttgccccccctcttctgaatccagttccttgccgtcaatcatgacgcggcctgaagtcggtttaagcaggcccgaaatgattttcaaagtcgttgttttcccgactccattagtccccagcaaagcatagattgagccttttttcacctcaaacgaaatatctttcaatacctgtttttcactatagtttttttgtatattcactaatttaatcattgttcgcaaacctttccgccatattgattctgcgaagaaacagaaacatgactccatagtttaatagtgtgaacaggacaaaaatacctgatgcagaatgaataagcatcgtttcaagttccggctttttatagataaaataggacgtgatcgcagcgatttgaagcgacacaatgaaaatgaaagaactgtataagttgttatacgtctttgctttccccgcttctccaatttcgtacagatgctcccagtttttcttaggatacagggcggtgcttgaaatctggacgagactgtataaaaaacccgaacataaaaacacaataaacaggtaaatcgtcagcgccgcggaagacggaaaaaacaccgtaatcaaaatggtgatgatgaacgaatagataagagcggcgagattataaatacatactttcggaaacaccagctgccacgcatgtttgatattccggtgaaacagatgctgattttttatttccccgtcaactgataatactgttttgagcgcatctccgacgagctgatacgaaaagttcgcaatgataaccgccgcagacacgatggcggctgccgaatacccgataaagtgatgcgatagaagcggaatacaaaaacctaaaaacagcatgaacaaatacagcatactgccgaagttcctgataaaaaacccgtcaattctcgataaaaacagcagatccttttgaaaaacggcatgaaatattttgttatttctatataatttcagctttggcgcaaaatcagcgtttgtcaaaaacatataaggaataaggtccattttcttcagcgtggccgaccacagtttaaacatccccgccgttaaaaggacggcggccgcaaacaccgcagcgaaaacgagcacggaatgtgagcggaatgctaaccatacatacggcgtattcatgaggatgttccggaaagccggtgactccgtaaagcttgaaatatcctttgcggtatactccccaaacacgagaagataaacggcatacccgactgcaagcggaaccagcaggctgacgctgaataaaatgcctttcaggattttcaagtaaaacaatttgctccatatatttgtaagaagataaacaacataagaaaacagcatagataaaaataaattgagaagaaaataaacgaagcccaagaaaaatacgatgatcgccgcagacccggtcatgcctgcgcttgataaaaacaaaaagaccggaaaaacaaaaagataccatacgaaaatggtttttttgatcgcctggccggcaaaaacagaaaacagctgtaaaaaacgcaccttttttaattgatgaatgaccttgcgcgtatccagcagaaaggcattgtgatgttctttaaagaagccggcagcccaaaaaagctgctcaagtgaaacggcgattaaaacaaattgcccccatgcgctgaggggcagctgaatcagttttgtcccgaatacaacaccgcatcccaggaaaacgagatataaacataacagagaaataataatggcagacagcagtttgctgttgagttgaggaatgccccaatcttcctttctttttcgaaacgatgacagggtattatatttgataagagccgcaatttgtttgactatcatactttcaatccttacatatgtatttgggagagaggctctttttgcagcttgtacaaaaagagcaattatttattggtcgattttaccaagcagctgcgtattttttgccgtatttcttaatcattgtttttgctgttgcaacgattgcataagaaatcgcgcctgcgcctgtaacgataccgatgagagaaatgatagaagcaattgttgatgccgcatcaataatatcaattgcttttttagctgctgctgtagagatgcccagagtcgaagctaattcagcattggctgagaatgcatgagccgccgccacgtttaattcagttcccgttaataatagtgcataaaccaatgttgctgcagcaagagccacgccaaacaaaatgaaagactttttattagattttactaagttcatcataacatctccctactctgtttttttaatttataataaaattcagcttaattgactctctcccgagctaaattttatccgccataaaataattaaagaaaatagtaaagagttttaataaaacaaaacatccagtcaaaatgattctcttgcctttactgagatcggtcagttttcctgcggcagcataaagagccgcaattgatatgagcagaaatggatccagcagctgcagactcaagctggtgccgccggcagaatatataagcgaggaatcagccgttaagtagttaacaactgaaagaatcaacattttaaatgccgagattaaagaagtcagtgtatatagaagcaaatatatttttttcggtttttttgtaccgagaataaaagcggcaacgaataatagaaatccgcctatcagaatttccacaaaagttgtgaagatcataaacccttgcagaaacatgacaatcgtacgaacacttttctccccgatatcgtaggtactttctccgacggaagaataatacgactgcagaactttatcggaaatactgaattggaagagtaatgaacagatcaaaatgatgaaaaaagaacttaaaaatatttttttattgctcaattgacctatcatattatcatccttttcttacaaaataaattaactattctatacttttacaatttagtttattcctatcaaaaaatcaatatcctttcgaaaaatatgactttagaacgtgttgactaagagcacatcttccagattttttgattctatataccctttatttttttccgaatttgcaaatagtatgatttgaaccgttgatttgaggatttttgtgaaggccgtcactcctaaacctattgaaaatctgcccatttccttttgtgacatatgtctgaattcatcacattttttttattgacttaaaacatggtttaagtcgtatcatcacccagtgacaaggaaaaaatactgttggaggtctttcgaagacatgttgttcaattcgtgaagcagcagcaaagtgtaatatgacagaatcaacgttacgttattatgaaaaaaagggactgctgccgctgattgaacgtgatgaagccagccggcggttattttcagcagatcaaatgccgctccttgatatcgtgatttgtttaaaaaatacccgcatgaccatcaaaggctttaagcaatatattgattgggtaattgaaggagagagtcctattaaactccggcttgacatgatgaggagacacaagcggtcagtactggatgaaatgtcgtcaatgacaaaggcttatatcaaaagctctgttcaagagacgtaagtttgttgaagtaaaaacaatcggaaaagaggagttaatatgaaactgacgggaaatacaatactgattacaggcggaaatgccggaataggattggctttcgcagaacggtttttaaaagcgggaaataaagtcatcgtgaccggacggcgtaagcacgctcttcaaaaagcaaaggaaacattcccggatcttattacctatgtcagtgatttgagcattccatctgaacgtgtatcactgtttgattgggtgaaagaaaattatccggaagtgaatgtgttagtaaacaacgcggggattcaacatcgttttcatgtgctgaaagcggatgcgaaggacaattgggactattttaataaagaaatcacaacgaacattgaagctcccttccacctgtctatgctgttcgctccgttttttgccggaaaagaagatgcggctgtcattaacgtctcttcgggattggcttttacaccgcttgctattgcaccgatctattcagcaacgaaagcggcgcttcattcatttacaatgagtctgagacatcagctttctgattcatctgtagaagtgattgaagttgcgcctccggcggtaaatacagatttaggcggagcagggctgcatactcaaggagaaccgctggatgaattcgctgatgggatttttaaaggactgaaagagggcaaactagaaatcggttacggttcttcagcggaacggctgcgcatgtcacgggataaagccgatgaacatacggcaaatatgtacaatgcgatgaaacatacaattgaataacctctttgaaaaagcaaaacccgcttctgttgagcgggttttgcttttattaaacagataaacgccttttttaacaatggtgcaagcgccatcgaaaagaaaggcgtcctattttttcatcctgagaatggcgggctgacccttagcactcttccggcgtaccggcgtttttggccgtgcggaaagaagatccgcagccgcaggaagcgatggcattcgggttgtcaatggtgaaaccgccgcccatcatggactgtttgaagtcaatgatcgtgccggtcataatatcaaggctttcgctgtcaaccaaaacggtgatcccgtgctgttcaaacatgctgtctttttcgcctttttcgtgctcaaatcccattccgtaagacaggccgctgcagccgccgccttttacgcccacacggagaaacgcgttttcttcttcatgctctttcatcatatcttttatatgcaaagccgctgcttcagtaatagttactggaacactcataagtagacctccttttttaaaaacggatgctgatatctattataaaccttgaggagcgtatttctcaaacgagctgtttacaaataatagacgccgctgcatacggtttcggcgggtcccgtcatcagcacgtgcccgttgtcctgccaattaatcacaagatcgccccccgctaaatgaacggtgatatcccggtttcgttcggaaacaccgttcaatacggatgcaacagccgccgcacaggcgcccgttccgcaagcctgtgtaatgccggagccgcgttcccatacgcggaaatgaagttcatcggcgctgacggtttccacaaattcgacattgacgccttccggaaatctcgggtctttttcaatgacgggaccgagcgttgtaagaggcgcttgattaatatccgcaaccggaaaaacaatatgggggtttcccattgatacggctgttccggaaagctccgtttctccaaaaacaaaggtttcatcgatcgtccgttcatcttcattgccgagcatcggcagctcttttttggtgaggcgcggttcgcccatatcgacggcgacttcacgcacaatcccgttttcttccgtaatatctgctttcacaaggcctgaaagcgtctcaatgaaaaaggacgtttcttctgtcagcttatgttcgtatgcatactttgccacacagcgaaggccgttgccgcaatttttcccttctgagccgtcattattaaaaatccgcattttgaccggcgctttttctgacggacagatgaggatcattccgtcagagccgatgcccgtgtgaatgctggacactttaacggcaatctcagccagccgttcttccggcagctgttcttcaaattgatttacatatatataactgtttccaagaccgtgcatcttggtaaaacggaatgaattcatatcggcctccaactttttttcttttacttagtataaaagctcttcccctcggacacaatacaaatatcccccgtttttcatacataaaagctccctgcatatgcagggagcttttatcgtttactaaataaacatgccggcaatcgccgcgctgagaaggtttgcgagtgttcccgcaataaccgctcttaatccgaggcgcgcaatgtccgaacggcggcttggggccaaaccgcccagtgtgccgagcataatcgcaatcgaagagaagttggcaaatccgcacagcgcaaagctgataatcgtagacgtttttttagaaaagtccgcaatatgcggaccgaagtttgaataagcgacaaactcattcagcacaagtttctgtccgatatagcttcccgctccgagcgcctcatgccaaggaacgccgattacaaatgcgatcggtgaaaacacgtaaccgagaatggattctaatgtaatatgtttgaaaccgaaccagccgccgattccgccgagaattccgttcactacggcgatgagcgcgacaaacgcaagaagcatggcgccgacattcagagcaatctgaaggcccgtggatgcgccttttgccgctgcatcaatcacattagcggcgccttcgccttcttcgtccatattaaaatcgccttttatcgtctgcgttttttctgtttcaggtattaacatttttccgaacacgagaccggcgggagccgccataaagctggccgccagcaggtattcaatcggaatgcctaacagggcgtaaccgaaaagcgtcgaacccgctacagccgaaaggccgctcgtcataatcgtaaacagctcggaacgggtcaatcccgcaatcagcggtttaatggcaagcggtgattcagactgtccgacaaaaatattcgcagccgccgcaagcgattccgttctgcttgtcccaagaagttttgacagtccgcctccgatgacgcgaaagatgagctgcatgattttcaagtgatacaaaacggcaatcagcgctgagaaaaagataatgaccggcagaacgctcagcgcgaaagccgggctgctgcccacttttaacagcgggccaaaaataaagctgatgccttcgttcgcataatcaatgagaagctgcacacggcttgagaaccataaaaatacggcccggccggcgtcccactttaatacgatgaatccgaaggccatttgtaaacataaacccacaatgacggttcgcaggttaattttgcttttcttctctgataacaaaaaagcaatggctaatatagcaactgccccgagcagcccccaaacgatattcaatgaatccacctctaaaattttatttaaaaaaagtctttattaagataacaatatttatttttgctgtctacaaattttttattttgccaaaacccgggcgcaataaaaaagagaccccgttcggagcctctgattaaaacatcggattttcttctatgaatgtatatatgttgtcaaccaactcagcaggcgtgccccccgtgaccacttcgccgttaaccagggcgaacagggactccatgcattttccgcagtagcttaaacagccgtactcaagcacgtccaagttcggatccttctctaagatctcaagtgcttcctgggaaccgcgcgctaaattgctgacacagaattcaatcatcggattcatgcggtttcacctcacatatgtaccttatcctaacggaatttcctctattcgtcaaagatccggtttcacgctcaatgttatcgtaacatattaattcaggttaaaggttttactattgcgtgttttctggtcaatttgtaggttattttaaaactattattgtggttttagatcaaattcgatataattctagatgttattttacatagttcgttattttgtaacaatattgactaccatatttttcgggcaaaaggggaatcattatgaaaaaattggtcttgatcggcgggggttacggaaacatgcgggtgctgcaccgcttactgccgaaccagcttccgtcagatgtatccatcacgctgattgacagaaacccgtatcactgcttaaaaacagaatattatgcgctcgcagccggcacgatttctgatcatcatatcagggtgtcttttcctgagcatccgaatctggatgttcaatacggtgaggtggcttccatcgacacgaaaaacaaacaggttctgtttcatgaccgcgaaccgatttcttacgatgacgcggtgatcggactgggctgtgaggataagtatcataacgtgcccggcgcgccggaacatacttacagcattcagaccattgatcagtcacgcgaagcctatcaaaagctgaacaacctcggcgccaatgcatctgtcgctatcgtcggagcgggattaagcggcgtggagcttgccagtgaattaagagagagccgtgacgatctgaagattatgttatttgaccggggcgacctgattttatcaagctttccgaaaagactcagcaagtacgttcagaaatggtttgaagaacacggcgtcaccattatcaataatgcgaatattacaaaagtggaagacggcatcgtttataatcatgatgaaggaataccggccgatgccatcgtgtggacggcgggaattcagccgaataaagccgtcagagaactggacgctgaaaaagacccgcaaggccgcatcgttttaacaccgcatcacaatcttccgggcgatgagcatgtttacgtcgtcggtgattgcgcgagcctgccgcatgcgccgagcgcccagctggctgaagcgcaggcggaacaaattgtgcagatcctcctgaaacgctggaacaatgaagagctgccggaaacaatgccgcaatttaagctgaaaggcgtcctcggttcactcggaaaaaaagcgggcttcggtcttgtcaacgaccgtccgctcatcgggcgtgtgccccgtttattaaaatcaggccttttatggatgtacaagcatcataacggctgataagaaaaaagccgctgattgcgatcagcggccatttttaagagcccgccacatagccgcgcttttccatttcttcatatatatcttttaaatgcggattcccttcccccacaatgacatcctccaccagcacgagcggatagaaaaattcatcgttcttgatgcgctccgcaagctcttctgtctccttttgctgaggcggtgcctcaatatcaatataccgcatgttaaaaggctgctccgggtatttccgtttcagcgccgcctccagccattcaaacgtatctttggcgctcggcatattcacgcagcttgcgcaaagcgtttcagcgccgtaaacactgagcgtaaccggctttgtcatgtatatcatcccctttacaccagtatacaaaggacggggcagcttttgtataaaaaacggtttttatgttcaagtttaaatatgctataatggagaaagcagctttgcaaaccaaacattagatttttaccgttactgtgaatataatggttttatgtatatgaaaggagcgaatctcatgactgaggttgaaatgaaagagcaagtacaggaagtattggataaattacgtccgtttctgcttcgtgacggcggtgactgtgagcttgttgatgtagacgaaggcattgtaaagcttcgcctccttggcgcatgcggcagctgcccaagttcaacgattacgctgaaagccggaattgaacgcgcccttcttgaagaagtaccgggtgtcgttgaagtagaacaagtattttaatcataaaaccaggctgcatgacagcctggtttttttatttttacaaatagtcatcaaaccatgaacaaatataacggatgcgtttcatccgctgttcgggatggccgcttctcgacagctcatgcgtagctttcggaaatcggatgaacgacgtcgttttgttcagtttcttcaacgcggtaaagagctgctccgcctgctctatcggacagcggtcatctcgctcaccgtgcaggatcaaaagcggcgtcgaaacgcgggatgcatattttacaggagaacgatcccaaagcttatccgcttcctcaaacaaatcatgtccgagctgccagtcggtaaaaaagaagccgatatcgctgacaccgtggaagctgaaccaatttgaaatggagcgctgcgtgacggctgctttaaaacggcctgtctgtccgacaatccaattcgtcataaaccctccgtagcttccgcccgtcacaccgagacggccgctgtctaaaaacggatacgcctgaacggcttcatccaccgcctgcatgacatcacggtaatctccgcctccgtaatcacccctgacacgattgacaaaatcctgtccgtagccgtggcttcctctcgggttgacatacacgacagcatatccttgtgcggccagcacttggaattcgtgaaaatacgtatggccgtacatcatgtgaggcccgccgtgtatgtatagaatgaggggatatgtttgatcctcttcaaaaacggaaggctttaaaaaccagccgtttaccgtcagcccgtcctttgtttcatattgcagcttttccggcacggatatgatacgctcctctataaaccgatcattgtaaaatgtcaattgcctctcttccccattttcaagtgaaatgctgtaaagctcggaaggctgtgcgggtttggcaatgacagcgatacagcttttctgatcaggatgaaaagcaaaaccgttcacgtactcttcttctaatcggatcggatatacgaggccgtcaatcgagatataataaataccggtgcttccctgctcgctcccgagaacgtaaaagccctgcccgtcgtttgtccataccggccggggcgtcactcctcctatgattgaatccgcaatcagcgcatcgctcaaatgaacatccagcatgtcggtcaggcaggacagccgctcagttttcacgtcgtacagccacgctttctctaaagtcgcattgcgaaattcattctcatggcccagcatcgcgatataagaaccgtccggtgaaaacacgcaggaaccgaaagaaccgcggtgcggcgtaatctgcttcaggcttccgtccgccagattcatcagatagacatcgctcggctttccggcgtcacccggctcgcataaattggcggtaaacgcaagctgcctgccatccggtgaaaaggccgcgccataatgatcagcttcatgatctgtcagctgctgaatctcccccgtttcaagatgaatcagcacaagctgtgtccggcttccgttcagcaggcccttcccgtcacgtttatatgttaatgattgaatctcaaccggctcatactcgtcatgcttctttttttctttctcatcggcgcgctccgctgatgtcagactgacggacacaagcacggatctgccgtcgggcgcccatatcggatctgatacgccccaaggaatatcggcagcctgttccgcctctccgccggcagcgtcgatgatgtacagctgagggatgccgtcctccctgtcagaaacaaaggcgaggcgccgaccgtcaggcgaccaccgcggacttgtatttttatcgtccccgaaagtccacgggtttgagatgccggattctgtgtcatataccataatggctgaggaataggaatcacgcttatgattgactgttgtccggacgtaagcggctcttctgccgtcaggggcatattgcgggtctgtcacggatacgagtgacgcaatgtcctcctcggttatgagttttttcaatcgtatctcctccttttcttttttatttcgcttccctaaataaaaatccttctccagaaaaagaaagcgtccttctctgatgggaagaacgcttttttatcattatacacttttcacctgctctaaaggattccgttcaattacgcttccttctgacgggacggtaagcgccgcaatctcacagtgagggaaatgctcagaaagctgttttctcagctcttctccctttcctttttcaatcaggacaagaatcgtcggtcccgctccgctcagcgccgttccgtaagcgcctttcatttcggccgcgtgttccacctttgaaagctcaggaacaagcatggcgcggtacggctgatggaggatgtcttttctcatcattttcccggcgagcgcccagtcatttgacatgatcgcagcaacgagaaggttgctgacggcgcttgctttaacggcgcgtcggtacggcagctctttcgggagcacgtctcttgcgtccctggtcagaacttcgtaaaacggaatcactgccacaacatcgatatccgcttcggcaacacgcacgatatgtgtttcatcttcttcgtgaaggccgattacaagccctcctgcaagggaagcagcggcattatcagggtgcccctcttcaagactggctaagtgcagcttgtcgctttccgacagctgcaggccgcataactcatccgcaagctcaatggcggcgacgatagcggccgcgctgcttccgagaccccgcgcaagggggatgtcactccaaactttgacatgggcgggcggcagctctttctgatagcggtcagccgtccgtttggcgacttggtagatgaggttgtccgttccttgagggatgcccgcgacagtttcggtttccgccgagaactgccattcatcgtttcggaaaaccgaaagcttcaaatatctgctgagcgccattccgatggaatcaaacccaggtcctaagttggcggtgcttcccggaaccgtaatggaaaacagcatctccgcctcattcatacacgcgccgctccatttaagtattccagaatactgtcctcatctgtcggcagcgtgatcggttttatgtcagatacgtccacagccgtattcggatctttcaggccgtttccggtcaaaactgcgacaaccttgcttccttttggaatttcaccggatttcacctgtttcaaaacgccggcgatggatgcacaggagcccggctcggcaaatacgccttcttcacgggcaatcagctgataagcgtgaaggatttctccatctgtgacttcatcaatttttccggctgattcttccgcagcgagcacggctttgtcccagctggcaggattcccgatccggattgccgtcgcaacggtttctggatttttaatgacttcgccgcggacgatagccgcagaaccttccgcttcaaaaccgcgcatcttcggaagtccggtgccgtttttctcatgatattctttgaaccctttccagtaggccgtgatattcccggcatttcctaccgggatcgccagaatgtccggcgcttcgccgagctgttcgcatacttcaaaggccgctgttttttgcccttcaatccggtaagggtttactgaattcactaatgcaatcggtgatttttcacaaatcgaccggacgatggccagcgcgtcgtcaaagtttccgtcaatcgcgatgatttccgcaccgtacatgacggcctgcgcaagctttccgaaggcgattttcccgtccgggatgatgacgatgcatttcatgccggctctcgccgcgtatgcggcagccgcagcggatgtgttgcctgttgaggcgcacatgatggtatcattgccttcttctttcgctttggcgaccgccatgaccatgccgcggtctttaaaagatcccgtcggattaacgccttctgttttcacatgcagttcaattccgagcttttcagaaagcttcgggaggtgaatcagcggcgtgttgccttcatgcaatgtcagggccggcgtccgatccgtcaccggcagaaattctttatattgatggatgagtcctttccacattagctccaaccgttcccttctacacgatatgtgctttttacttcttgtacaacttctagatcatttaagttttgcagaatgtcactgaaatcttcttccgatgtatgatgcgtgacgatgacgatttccgcgagatcgtcatgtccttttatcggcagctgcagaattttttcaaagctgacgccgcgctctgagaaggccgatgtgatttttgaaaaagagcccacctggtctttgacatgaattcttaaaaactgctgggcgtagatatcagacggctgcttcagatttctttcaaactgcggggcgacaaagctgtttccgtttacgccgagacgcatgtttttcatgaccgcgaccagatcggaaacgactgatgtcgcagtcggcatgcttccggctccggggccgtaaaacatcgtttcgcctacggcttctccgtacacgtaaacggcattaaactcgttatgcacggcagagagcggatgatgatccgggagcagtgtcggctgaacgctgacttcgattttattgtcatcacgctgggcgatgccgatcagcttcatcgtatagccgagccgtttgctgaagctgatgtcttcatccgtaatccgggaaattccttttaccttgacatcgtccagatcgacgttcatagagaagccgagacgggctaaaatcgccatcttgcgtgcggcatcgagtccttctacatcggcggtcgggtccgcttccgcgaatccgagatcctgcgcttccttcagcacttcttcatacgggcttttttctttaatcattttcgttaagatgaagttcgtcgttccgttgacgattcccatcatttttgtgatccggtcagaggaaaggccttcttcgagcgtgcgtaaaatcgggattccgccggcgacactcgcttcataatacaagtcacagccattttcctttgcggcggctaaaagctctgacccgtatacggcgatcagatctttatttgcggtcacaacatgttttttcgctttcaaggcatcaagaagatattgcttcgtctgttcgacaccgccgatgacttcaataatcacgtcgacctcagggtcatcgatcacatcatagacttctgtcgtcagcacttctttcggcaggtctgcgtctcgttttttatcaatatctttaaccagcacttttttaatcgtcaccggacagccgacctggtgcataagcttatcctgatgatcttgtataattttgacgactccgcttcccacggttcccagtcctaacagtccaatacgaatcgcttccaaagagaaactccacctttcttccttttgtccactagaaaaggacaattgttaacccttcacagacatttaagttacaaatattatataagcccgcatttgttttgacaagcggctgaatattgtttctacggccatgaaaacgcttaacacattgatatgacaagattccctattttctaaatatttttacgttatattttcttacgaactgattccttttccgagccacgccacaggcgggacaaaaacctgcgccgacctgacattcatcatgtcgtgacatgtctgtaaaaactgttcatagcgggtgcagtcggcaagaatgtagtcaagctgctcttcgtaaaactgtttttcagaatcatgagaaatgtaataactctccaccgtctcaaagaaatgaagcggaaacagcaggcggctgtaaaacaggcgcttggaaaaggaggataacggcgtaacttgctcatattcctgcaaaaacaaaaacccttcgttaagcaagtcgtcacgatgatacaaatatgtgctgcgcatatattccgcaatatcacgggcggcatggtcgaatacccaatcgcccggaatgcggatcaatgattcctccgaccaggtatcccgttccatccgctgatggcagattgtccccgagtcttctgcgccgggattgtcatccagctccgtatccactaaatattgaatcgcattttccgctaagcctgaataataaggaaatgcttcgatcattttcttttcgaacggttcaagcggagacatatgaattttctgcatccagaatgattccagctgatccacccgttttccccataagtccttccattggccgatcctgcccgcttctttcacttcgtacggaaaaccccgcccttttctgtgaaattcggcaagctcccctccgacagagaacgaccggtttgcgacggggatcggcgcttttaagagcgcatacgttttgccttcgtcctcaaaggtcagttctccttccttcgtaaagataaacactgaaacgtatgggtcactttgttcttgtaaatactgactcatgtagtaaagctccgtcagctctgattgcgaaaacccggaaacgggaataataagaaagaaggaattaggcgtctggaagcattggtatttctgataaacggaaagctgtctgacgtggatgccgtacttttctttaatgatgcttttcatcataatcacctgcctgaaaaattagagctattcacatcgtagtcatacgccggcggaattatgaatacatattgtaatcctttgaatcaagtggagaaacatcgtacacatcggaagggtgttgtataaactagtaaaaaaagattgggtgaagcaaatgtcagaaaaggaacaactgaatcaggtggaagctgtcgccagagcgcgtttaaaagaacgggggttgagacggacgatattgccgagctggtgtatttccttcagaaaaaatatcatcctgatttgacgatggaagtatgcaggctcaatgtggaccgtgtcatcgcaaaacgcgaggtgcaaaacgccattttaacgggaatagaattagatgtgctcgccgaacaaaaaaaactgtctgaaccgcttcagaccattctggcgattgatgaaagcctgtatggggttgacgaggtgctcgccttctctatcgtgaatatatacggctcaatcggctttacgaattacggctacattgacaaagaaaaacccggcattctcgggcggttaaatgataaatctacgggggaatgccatacgtttcttgatgatatcgtcggcgcaatcgcagcagcggcttcaagccggcttgcccacagcgccagaaatacagaataaggacggccgtcatggccgtcccttttttatagatgttcaatccattcggttaaagagtcaatcgcatatgtcggcttccggtcgtaatctgccatatgctcacgctttgtcactccggtatgaaccagcagcgtatccatgcccgcattgaggccggccataatatccgttgcatagttatcgccgaccatgagtgtttcggaaatatccgttccgagcacacgcatcgcctgttccataataatggattcaggcttgccgataaagacaggctcaacgcccgttgacaccgtcaaaacggatgtgagcgaaccgttccctggtaaaagccctctttcagtcggaatggcgacgtcgccgtttgttgaaatgaaccgggcgccgtttctgatcgcaaggcatcccgttgccaacttttcatatgtaatgccgcggtcgattcccacaacgacaaagtccgcgttttcttctccgaagctcagcccgttttcttcaatggcctggcggatgccttcttcgccgatcacatacaccgacgcgtcttttttctgctgggcgatatgctgcgcagtcgccatgctcgtcgtgaagacctgctcttcagttgccggaatgtcaaagctcatcagcttgtccgccacctgcttcggcgtccgggaagaattgttcgtcacgaataaatacggaatgccgcgcgctttaagcgttctcacgaattcacacgcttcttcgattttttccgtcccgttgtacattgtgccgtccaaatctatcaaatatcctttataatccttcatactcaacactcctgtggattttctcactcgttgttatttaaatgcggaaacaggccctaattctgtttccaggtaggttcttacacgggccggaaaggctttcagcacgtccctgtttgacgtgatcagcgtaaacagctcctgatgatcggcttgctgatattcctgaacaagccgctttctggaagagatcagctgcttgagcttattcgcttcatcctcagctaccaccttttcatccgtcagaatatccatgatgtcgtcataactccccggatcgcgcatgataaagccgtcaatcatatcatttccgacatcgagaatgcattcgatcataagatggctgatccgctcaagcgcccttttttcgatttcgctctgccatgcaggcgtgctgtcaaacagcgccagctgggtctcaaaaaaacggagtgtttgttcgatattatttctgtcaacaaaatacacgtgacagcatccccttctgcatcaattattttctgattcgttttaaaacaaaatacgcgcagccgaaattgcagtattcgtaaatgtattcgtccaatgtgctgattttcgtttcaaaggttgctttttgattctggtcatcaaagaagcctttgagccgcagctgactgtatccccagtctcccacaatgtaatcatatttatttaatatgtccgaatagcgggctttgaacgcttcttcattaaagccgtttttaaaatcgtgtacgagttcaaactcggcattttgaataagaatcatgtcttcacctcttttatcactctttactatcataattcattgacttctgtccatcaattgcaaaatgagacggttcggacggacggaaaaattttccccttttatatccagtgtagcggttctgacgatccttattcaagaatgactttttccctgcacagacggctccatcacaaaaaacccaaaacctgcggcgttttgggttttttcggcttatcttatgcttgggcctggcgttttttagacgcttcgttcacttgttcatccgcatgataggaagaacggacaagcgggcctgcttcacagtggctgaagcctttttgcatcgcgatttctttcagttcggcaaattcgtccggatgataatatttttggacttttaaatgttttttcgacggctgcaggtattggccgatcgccatgatgtcgacattgttcgcaagcaggtcgtccatcacttcaataatttcttccttcgtttcgccgagaccgatcataatgcttgatttcgtcgggatgtcaggctgcatttctttcgcacggcgcaagaattccaaagaacggtcatatgttgcgcgggcccggactctcggtgtcaggcggcggacggtttcaatgttgtggttcagaatatcaggacgggtatccattaatgttttcaggttgtcgtaatttccgcccatatcggatggcagcacttcaattgtcgtgaacgggctttttctgcggatcgcccggaccgtttccgcaaagacgcctgctccgccgtctttctgatcatcacgcgccacggccgtgatgacggcgtgctttaagttcatcagtgcaaccgaatcagctacgcgttccggttcctgcagatccagctcagtcggcagacccgttttgacagcgcagaagcggcatgctctcgtacagacggaaccgagaatcatgaacgtcgccgtacgtctgacagcccagcattcatggatgttcgggcattttgcttcttcacatacggtatgcagattattttcacgcattaattttttcagacccgtatagttttcattcgtgttcagctttattttgagccattccggctttctcagatgctcgtctttctttgccatttccccatcatctccattatccctttattcatgttcgtgtgcgaaaaatttctatttcacgatggatataaaacttgcagatttctattcaatagtcactttaacataggaaaaatttctcgacaagggaagagaattacttacattttctcggattgttgccgcaaactagttgtattaatcctgaaaggagatcatgttgtgaaagttctgttatctgctcttctccttttatcagttttctgtccggctgcaagcgggaaagaacaatcggctcctgtttacggtgaacggatgcagttgtaccgcaaagccgaagcagtcacgcagattccttggtatgtgcttgcggcggttgatcaatatgaagaaaatgtccgctcgaaccgaaaggatctgccggaaaaagcgggaatcatcagcatttatattccggatcatttgtggagcgggcctgaaaatccaaatcctaaggacgaggcgcccctcagcattaaagtatttgacgggatcggcctggacggcgacggcgacggaaaagccgaggtcagcaatgatgaggatatcctttatacatttgcacagtatttagcgggattcggaacggatcttgaccatatccgcatcggcctctggaattattaccgccgtgatcagacggtcggcattatcaccgaattcatgacactgtttaaaacgttcggccgccttgatctcggagagcacgcttttccgcttcccgtgaagacggattacagctaccgcagcacatggggcgccgcacggggtttcggcgggcgccggattcacgaaggaacggatctgttcgctcattacggactccccgtcagatcgacctgctacggtattgttgaaatgaagggctggaaccgtttcggcggctggagaatcggcatcagggatatcaataacacgtatcactacttcgctcacctgaacggctttgcaaaaggtgtgcataaaggccagatcgtcaaacccggagaggtgatcggctctgtcggcagttccggatacggaccgccgggcaccgcgggaaaatttccgccgcatcttcactacgggatgtataaagataacggcagatcggaatggtcttttgacccgtatccccatttaagggcatgggagcgaaaagaaatccgcaggaaaaagtaaacacacagccgccaggaaagattgcggctgtgtgtttttatttatctttcttctgtttttcactcggcagctggacagaaggcgtcacacctgatccgccgcttccgttataaaactgcggcacctctccttgaatcgctttaatggagaccggaatattatttgtgacgactgatgtcttactggcaaacggaataatgaccttcactttaatttccacaaaaatactgatatcgatcagggcattgttaatgccgtacggctttatttttgttttcacatcagttaacgcatcaccgatcaggttaaagcgcacggggattttcggccccagatttccgagaacgctgtttcccgtgacctgccctaaagggatgttaatcataatttcatcggccgttttcgcgcctttttccgtttcatgctgcttattgttcgactccgcttccttcaaatgagcctgaagctgctttgtcactttcgccttcatgctgttgaccatttgtgtattaaaatccatcgttgtgacttttccgttttcatccgttttcatatcgaccatatctttcacattgtcgctgtgagacatgtattcttcaatggattccgtaatgacctctgtcgccacccgtttggtttccatttctcctatgttcatcagcaccggtttgattgaggagttgatcatccagaggctgatgaccgtcgatatgataaaaaaagcaaacgacagaagaagcacatatcgaaaaggcaaaggccctctcttgcgaagagcgctccggtatctaggcaagaaaaatcccccttacatatcacaatgtatgcttgtaagaggggacatagtattttatttttgctcttaaaaagtcccgcttaccttcattcgggtgagatggaacggccggcggatatttgacattacgcttgccgcgcgagcttccaggcgagcagatcccttaaaaactccggcataaaatattgtttttcttttgaatcgcggatgtaagggaacagctttccgagtgtaaacatgtcgagaacggcaaccgagtatatccgctccggatccacctcttctccgttcactttcacattgaggagatgcgtcacaccgtcttcaaggatgccggcctctgcctccgctccggcatataccatcctgcccatcacttccccgcggaagccgaggcctttaatccgcagctgctccatttgttccgaggcggcctggctgattgtttcccggagttccctgcctgaaagacgaacggcgaccggattgatcggatgagggcagatgcggtgcaagtcaagttttgtgacaggccccttctgtaaaggccccaaaatgacgcctgaattcaccatgctgacttcacagccgcaccagcttttcagcgcttcggctaatagaagcgggagcggcgattcctcaaaccacttcacgccggcttcttcattcagattggcgacttgtacggagagcaggttttccgcttcccgttctttctctttcagaaaagccgccgtatcttcagattccccgtgccaatcagccattttctgtacagatgcctgtttgctgacaatggttcgtgattcactttctatcgtcagctcgacacagccgacatagttcccgtatttctccgcacatgcaagcaatacgccgtttatatcctgtccgtcctcaagaaggtggtgcgtatgtgattcaagaatgacatcgatgtcgggaaatttttccgctgcggcccggtcatcgatcaggcctaaatgagaaagcagaatgatgatgtccgctttgcccttgatatcgtcaagtgattcttgaatgcttttttccgcatccgtcaccgtccagccgagtttctgatagacgggataatacggcaccgtgaccccgagtatgccggcggtcatcccgtttttcagcgttttgatcacgtagggctcggcccattccggccgctgtccgtccgcgtcaaacaggttggacacaatgacgggaaacgcggcatgagtatataaacccgccagctcatcgtgaggcagcgtaattccttcattattcccgacggcagccgcattgatctcaagccggtttaacaagtcgacattcgctttgccgaaggtcgcttccgttatcatttgaaatcggtccatatgatcgccgatgtcgaatacgagtgtttcctccccgtttttttcatgctcttttctcttctgctcaatataatgtacgattttcggccaattttcgaaatggctgtgcaaatcattcgtatgatataaacggagtttctctaacataccatctctcctaccttttagctgaatatcccttgataaatcaattcacagccgatcaaaatcaagacgacccgcatgaaaagcacgatcgttttcgtctgcacccgcttattgacccacgcgcccattttcccgccgaaccacgcgcccggaacgaggcacagcgcatacagccaattgacatggccctctgcgatatgtgacacggaacccgtcacggaggataagaaaatgatgagcattgacgtcgccacagccactttcggcgggaacaaaaataacagcatcatggccggaaccataagagagccgccgccgatgccgaaaagaccgcccaataaaccgacgaaaaaggcaatggcgataccggtaaaaatacggtacgaatatgtataaagctcacccgtttcatcctcatatgtccggatcatgcctttatgcgctttattgaccggttttgctttcgccttcagcattaatgtaatagaaatcaaaatcataaaaagtccgaaccagacggaaaacgtatgcgcattaaaaagtttagacaaatacgcgccgatgatgcttcccgggccggaaccgataaaaaagatcagtccgcttttgtagtcaacggttttatatttcatataggccagagttgatgacaggcccgtaaaaataatcaccaaaagggacgtgccgatggcagtctgcggtgttacgtcatggaaaaacggggtcatcgtgcttaaatagagcatcgccggcacgatgataattcctcccccaagcccgatcaggctgccgaccgttcccgcgataaatcccaatataatcaaaataagataagacatgtgtcttgaaacctcttttctagctgaataggtcgagctgcttcggagcaagcccggtatatgagatatctaacatttcaagcatctcaagcccgttatcggcggcgtctccgcctgagttattgttgaagagcacatacagattgcgcgactgctttttcagctcctgaagattgtttttccaatctttgagctcctgtttgttatagcggtataaatatctgacctcacgccagttttgtccgccgtcaggtttgatccagccctgcttgttccgtccatgaaaacggacaagcgttttttcttcatccgttgctttcaggacggtcggaatgctgccctcgccgatttgcggctcgtcacatatgctgtgaatccagccttcctccttcataaaggaaagcgtctgttcgtaaaatggcggggaaaaccaagatcggttgcggaattcaagcgcgcacgggatatcgcccatctgcttcctgcaccatcttaaatatgcgacgttttctttcttgcagtcaaaccacggcgggaattggaacagcaccatggcaagctttccatgctctatatacggcgataatgacagcttaaacgcctcaaacatttcttccttcgattcaaagggaatatcaccgcgctgatggcccgtcattccttgaaatgccttaatgacaaattgaaaagattccggcgtctctttgacccatctttcgttattgcgggcgggctgtatcgcgtaaaagctcgcgtccagctcaacgatgggaaaatgggaggaatacgcctgcagtttttgcgggcccgctgttttaggcggatagatgctgtcatgatccccccaccccgtcagtccgatataaatcacaatccttcacctctcattctagtttatcacaggtgtttttctctttccgtttccatgttttttctgaatgcactttgcaggtaacggtactgatgttcattggtgtccgaaaatgcctcatctctggaagaaagaatatgctgatagacgatcggctctgaaaactgaccgctcgtgaaatcatatatctccccgtctattcgattataaaaatgccagcttgtgccggtttttgttttgagaatgtcaccgccgtaaacatcttggatgactaaagccgtcacgccgcactggcctgtggccgggcaatcttccgtccattttgtactggtcttgcgcgaccaggatgccgttaatatgttcaagatttgatcatacaatgtgttttactcctttttataaaaagataccacgagacccgctttccaaacgacaaaaaaagccgattctcatcagagaatcggcttttttatttcacaaggcttcaggaatgttccgaaagacccgctctgcttacgaccgccatcctgatacacacagcaccccttgctgtaggtcgcagcaattcggtatggaaaggtgcggccttcatacaggctttgcttatgtttggaaaacatcgtttcttttgtgacggtaaaaggttccggccggacaatggcaaaatcagcgtcaaatccttcttcaagccggcctttattcgttaaaccgaaacgcttggcaggtgcttcggccgtccatcgggccacatgttcaaacggaatcccatgatcgatcgctaattgaatcatgccgagaagcgtaaattggcctccgctgatcccgccccacgacaggaacatattatcctcgcgtttcaaagccggatgacagggagaatgatccgaagacaccatatcaatcaggtcttcagccaaaaccccgatcaattcctctttatcagcctctgagcggagcggcggagcgcatttggcagccgccccttttttgaggaagtcttcaaagctgaataataagtagtgcggacacgtttcaacggtgacatccaatccgtcttttttcgcctgctgaatggagagcacggcccgtttcgtgctgatatgtacaaaatgaagcgcgcatcccgtcgctcttgcatattcaatcgcccgctgcacagcctcgcattcggcttcttccggacgggaggaagcgtaagcgcgggcatcaattttcccttggagcgcgtactcggcttcaaggaatcgggtgagggcgtcgctttctgcgtgcagggccaaaatcctgccgcacgccgcgatttccttcattccctttaaaagagtccgttcatcggctgattgaaattcatccgttcccgatttagacagaaacgctttaaacccgattgcccccgcttctgccatcggccggatatgttcggtatacccgggcatcaaaccgccccaaagcgcaaaatcaaccgctgacttccgttcggcgatttccgcctttgccagcaggttttcagcagttaccgtcgaaggaatgcagttaagcggcatgtcaaaataagccgtacagccgccggcagcaagcatgtttgagccggtttcaatgccttcccattcttcgcgtccgggttcattgaaatgcacgtgacaatcgaccgcgcccggaaacacatacatgccgtctgcctgcaccacttgttccgcgttttcgtcaatgccgggctcgatcaatgcaattttcccgtccttgacggcgatatcggcccgctctgtcccgccttttcgcacagctttcgcaccctttacaattacgtcataggccattttatcttcctccctgtaaggatgacgattttctgtcagtttttatcacaacatgcgtctatgattgccagtttactgctactatgatcgtaatacatcagcaaaaccgctataatttttgatgacttttattcatattaaccaatggttgtctttagaacctgaaaggagattgactgatgaatatttatgatgtgatgaagattcccgcttatgagcgggccgcattaatcgcaggcagatccggcggctggagggaggtgcagcacgtcaacatgatggatgcgccggacatcgctgattttttacataaaaacgaattgctcgtcacgacggcttaccacttgaaggaccgcccgcagctgttgaaagatttaatccgcctcatggcaaaacggggatgcgcgggactggggatcaaaacgaagcgctatcttaatgtcattccgaaagatgccgcagagcttgccgaccggtatgaatttccgattattgagctgccggaagacatcaggctgggagatatcgtcaatgctacattgagccatattcttgatatgcgttcaaatgagctgcagcaggccatttacgcccataaaaaatttacaaaccacatcatgagcggcaaagggctgcaatccctgcttaagaagctctcagacattctccggcttcccgtgctgcttttggatcagcatacaaaactcttatcatcgtcccacagcatacccattgacacgtctttattgaaaaacatctgttattccctttccggtccttatttcacctgcttttccatgctctccgacagaaaggtgtattctgtcctgccgattctgaatgttgaaaaaaactgcggttatctggtgattccggagctggtgcagaccgctgataaaggcatgattttgacaattgaacaggcggccaacgtcatttcctttgaactgctgaaagaaaatgccgtcaaacaattcggcagacgggcgcgcaatgaatttttcagcaatttcatcgaccgctcgtttaccggccatgaagaaatcaaaagccgtgccaaagaattccggctccgctgggatcagaaatacatgtgcatttgcggaaaactcgaccgaaatgagaaaacgatcagctttaccgaaaatcagctcgtttccgatcatgtatttgatctgcttgaaggggagctgtcatcctttccgtttccccctcatctctttattaaaggaaatgtcggtattcttttaattgaagcgacagacagctggaatgaaatgcacgcgtctgtcatcagctttttggagcagtttcagaaacaggtccggacgcagtttaaacggactgtctccttcggcatctcaaacatatgccaaaagctgatcgatgtccctgacgcttttactgaagcttcagacgccatttcatccgggcatttgtccagaagcgcggagtttattcaaatctatcatgccaaagacgtgccggagttgctcggcctgcttccggcggaagatgtgaaaaagttttacgaagccaccctccaaagcctggccgaccggcaaaaggaggaccagagcctgcttcatacactgtctgtttacctggaaacccactgccagatttcagaaacggctaagcgcctgtacgtccatcgaaatacggtgatctatcgtttagaaaaatgcgaggaactgctcggcaaaagcttaaaagatccggagacgacgatgcgcctgcggctcgcgctgagaatgcagcggctgatcggttaaaatttagccatagaccaggatgcgggtgttctcccgcatcctatttaagggggattcattcagctaaaccctcaaaaaatgctgccattgatatcatcaggctttttcgatattcaggatgcaaccgataatctcaccctttttgatttcatcctaaactgcctcggaacctttgtcacaagcacccatgacccttttttgatggtttcgccattcatttgaaaatcagcggggagcgacacaagactcaaccacttccccacgccgccctgaaagtcatgctgcttttccttttctgatttcataaaaaaaccgcttttgattagcagccttatctacgtaagaaacatgtatgatgtttgcatttatcaattcacttggcatgtgttcactcatttcaaagaatatttaacaatttcttcattgttatatttccattaagtgttactgttatcctataaataccaaaaggaggttttacgttgaaactagctaaaaatgctttgttatcacttgcaattgtttcattcgttttcgcgcctttttttaactcttcagcatcagccgccggtccctctactaaagtgaataagaatttgtttcaatctcagtctgaaacccgcgtcaatttaaaagtaggagagataaggaattattctacttctggtaatcgcatttcctttaatcctacgggttataaccctcctgctgtgacatggagagctttaggtactgactacaaaaccattcaggtatttgcagtcgctaaaggagaagcctggattgaattctatgatgattcctccacttggaaaacccgataccattttgtagttcagtaataatccgaagagatagattctatctcttctttttaattaaacgattgcgacgttttgaattttttatttttcctcaactgacagccccaaaatctcgttatctactacaggagacagaacgcagtgacaatgaacccgctcagcggcggaaagctttgtgtctcgcggatacatacaggtttcgctgcttcctggtatcttgaattcttcgtcaacaccaacagtcgaacacatcaagaccaaaaaccgcttctgacaggccgcgcaaggggattttataaaatttctgaaaaaggaggggcgcttcccctccgtgaaccgtaataaagcttcgtgtgttggctaatggctgtctggataatggtctcactgtcatcctggaaagatcacttacttctataagtctttctttttaacagaaaccgcagatatagcagcagaaataactatccgctccgcttcttatgcactctctgtaacatggggaattataaaaaggagggcgcgcggaaacatagggggagccccctgaatgagtcaattgatgggcccatggataataattaaattcttgccgctgatacaaatggaatgacgggtaataatacaacattttcaactccttttccgtacaccatattgtacttaccgacatcctttttagatgattgtctcttgcataattgtgtgttggcctaattgcgggttttaatctgcaaaattcatgcaggagaaccatcacaacatcttccgggagaggttttataagataacctctccttgttgtcaccaatcgccccctactgaacagttcgtattatttcaatgacccgttttatcagaatgctctccccctgcatacgaaacagcaagttccaaaaccctgctttttccttctcagcatttacgccgctcaatgttgtccctgcctgcctgactgccttcttttttgatcaacttccggcagatcaaattcatcagactcgtcaagcgataaagctggttttactttatctacacctgttccggtttccattcgcgccatgcttgagcatacggaacaactgtttttgctatatgattttccctctatgcgcatctctgcaatttcagagatgcagacagccgcagaataaacgacaatcagcaaaaagcctccggatacccggaggcttttgattcttatccttgctgcgtgaacggccgggtctgtgtctttttgccccagccaagcgcggccagaaaactgatggcgagaatggccgctcccagcatatacggaaattccatatttacatcaaagagaaaaccggcggccgacggcccggcgatattcgctaagctgatgaatgaggtgttcatcccgccggcaaacccctgctggtcaccggcgagcttcgacagcatcgtattaacggccggccggagcagcgatgtcagcgtcaggaaaaagattgccgcggcaaaaacggcccaatatgaacccgcaaaccggcaccacacaagtcctgcagcagccccgatcaacgtcacgttaatgacgcgcttttccccgaacctgcggacgagataactgacgccgaccgcctgcacaaatacgccgatgagacccgcagccgtaataataaaggcaatatcagaggctttaaatccgtgtttatggtcaacgtaaaggccgaaaacggattcaaagttcataattccgaagttcagcacaaaaaccagaatcagcataaacgcgaacggcgatttgagcgcgcgtgacatttgcttaaacagatgctcacgtttttccgtttttgcccgggcttccagctgcttttcacgccccagcgtttcgggcagaaagaaaaatgaaagcaccgttgaaaagcaggcgagacttgcggacacgatgaacggcacagacatgccgtaatgaaccaaataaccgccgacaccgggcccgatgacgacaccgagcgtcatcgccgcgctgaacagccccattcctttcccgcgttcttcctcggtcgtaatatccgcaatgtaagcgaacattgacggcattaaaaacgccgcgcccattccgcccaaaaggcgggatgcgaacaattgccacaggcttccggcaaaggcgaagatcaattgtgacacggcaaaggcggcaatgccgaaaataatcagtttccgccgtccgtatttgtcggttatttccccggcaataggcgcaaataaaagctgtgtaagccccgccgccgcaacaagcagacccatcgtgctccccgtcgctccgaattcggtaatatatgcgggcataatcggaataatcaatccgatcccaagcatcgcaataaacatattcagcattaaaattgacaatcgccccatgtacgccatgatttcttaccttctccccagacaaacagatgatcattccatatttgtcattttttataccattcagtataacggggaaaagggaaaaaagtccagatgatttcaatctcgttttcatatctcatgacagcataccggtttcagccggcagatcatatatgttaagggccgcctgcagcgcttccccggctttaactgcaactccgtgtctgatcagaaccgcttcaagtccggccagcacaaacagcacattttcctttctgcagctgtagcccatcgttccgattctccaaattttcccctgcagcggaccgaacgaactggcgatttcaattccgaattgagacaaaagcatactccttatcgattcgccgtctgcttccggcggaatcttcacacatgtgacgacaggcagcttcgcctccggatcgccgaataaatcaaggcccattgctgcaagtcccgccgtaagcgctttttcatggcgctgatgcctgcggaaccgttcttcaagtccttcttccagaacaaggcgcacaccctcccgcagcgcataaagcattgctgtcgcttctgtatggtgattcagccttctttcactccaataatcttcgagctggctcagatcaaaatagttgctcgtaaccggccgatgaccggacagcattttaccgtcagctgctgtcgcaatgccccgttctacctttttacgcgcggcaatgacagcggccgtccggtcattataagtaatcggcgccattccggaagggaccgataggcatttttgcgttcccccgatgactgcgtcaatcttccattcatccgtttttacggcgcatccgccaatcgtggccacggcatccacgataaagagtgcatcttgggcgcggcacgcttccccgatttctttcagcggatgaatccgccccgttgatgtttctccgtgcaccatagcgacgattttcggggaaatctttttcatctcgccgataatctcttcaggccggaagaccgttccccattcacactcgatcgtatgaacgtccgctccgtaccgctcggcgatttcagtcagcaggtgtccgaagcgtccgtatatcggaacgagcacgctgtcgccaggttctatcacacttgcgagaacagcctcaatccccgctcttgatgtgccgtcaatcggataggcccagcggttttccgtttgaaacaattcacggagcatttgcatcgtttcgttcatgataccggtaaatgccgggtcaaactggccgaggatcggagcgcccatcgccctcagcactctcggttcagcttctgtcggtcccggtgtcattatcgttctttgcggaatgcacaattcttttctggtcggcacgccgattccccctttacgttaataagcaagtttatgtaatacattcgccagcgtaaggacgccggtttcaagctgatgtgcgggtgtgaattcaagcggcgagtggctgatcccgccacggctcggcacaaaaagcatgcaggccggaaaggttctgccgagcatctgggcgtcatgtcccgctccgcttacgatcttctccgggtccgccccctgctcttttgcagcctgtgctgcggttcgtgtcagtatgtgatccatttgaaccggctctatcctcatatattcatcaataaagggtctgactcctttgctgcggctgatgttttcaataatcgacaccagtttctgatggaaggctgccagcacgtcttcctgctggtggcgaatatcaacggaaaactggatacggcccggaatgacattcgccatattcggctcaaccgtcattttcccgcacgtcaggcggagctcttccggctgtctttccgctgagagcatgagttcatggatgatgctgcttcccgccgcgagcggatctttccgccatttcattgaagtggtccccgcatggttgcattcaccgtcaagcgtaacggtatagcgtctctgtccggcaatcccggtgacaatcccgatatcctttcccgatcgttcaagcgtttgcccctgttctatatgaatttccagaaaggcactaatatcagtgcgcagcggcgccggataacggcctgcaccgaagccgttctgccgcatggcttctttcagagaaatgccggacgcgtctttcggcgtttccgcatctgaaagcgagaaagcaccggtgatattgcctgagccccaataggtgatgggaaaacggctcccttcctcttcacagagcgacacagcctccagcgtttttttcggacgcccgcacgtctcatgcaaatgccggatcgccagcatgcccgccagcacgccgaacgcaccgtcatatttgccgccgtcaataacggtgtcaatatgcgacccggtcagaatcacctcatcaggcgattctgtgccgctcagacggccgaacacgttaccgacatcgtcaaatgccgtttccagcccgaacgcctccattttctttttgacggcaagctgggcgtccatccattctttcgtatataaaagcctcgtcactccgccggaagcggaagcgccgaattgagacagccattgtatgtcatcggaaatcccgatattcgccgccgaaagctgctgatgttccatatatgccctccttttaaactgaaaaactgacaagatgatcttcattatagaaggagcgcataacgagttcattatcatatcttccaaaaaatcaatgattttccggatactttgaccaagaaaccgcccctctgtcccataagccgaaggaaccatttttcaaaaaagatagaatattagatttattttttggataatagaggtaaaggagggcaagtcatgacaaaaaaactttggtttctgccgattgtctgcctgtttttcattttgggttggaccgcgccgtcagcctctgcgggcgcgccggctgacacgaatctgtacagccggctggcggtttcaactgccggcggcacaactctttttccgcaaacttcctcagctgtcatcactccgtctgcggatacggagacatattacaaagaagcttccggaaaaagcggaacagccttaaagagcgccctgcaccgcatcatcagcggacatacaaagctgtcttacagccaagtatggaatgcattgaaggaaactgacgaagatccggcaaacccgaacaatgtcatcttgctctacacccaggaatcacgggccaaaagtaaaaacggcggcagcgtcggggactggaaccgtgaacacgtgtgggcaaagtcacacggaaacttcggaacagctgccggccccgggacggacattcatcatctgcgccctgcagacgtccaggtgaacagcgccagaggaaacatggattttgataacggcggctcagaatacccgaaagcgccgggcaattattatgacggtgattcctgggagccgcgcgatgaggtcaaaggagacgtcgcccgcatgctgttttacatggcggtgcgttatgaaggcggcgacgggtatcccgaccttgagctgaatgataaaaccggaaacggctcagctccttacatgggaaaactgtccgttttgctcaaatggaataaacaagaccccgtcgacagtaaggaaaaacggcggaacgaaatcatttacgaagactatcagcataaccgcaatccgtttatcgaccacccggaatgggcggacgaaatctggtaatcgtatcataagaagtgataagggagccccatcatcaggctccctttttcaatatacggcgttttcagtgtcggcatcaaaaaacacggcccggttcatattgaccgcaagcagaatggcatcgccgggtttcacctctgaagcgccgtcaaggcggatcgtcatgcggtcatctccgctcaccgcatgaacgtacatctccgcgcctaagttctcacatacttccgccacagcgcggcacaccgcttcaggcgggtgctctgattgtccggcaagcgtcaaatgctccggacgcagccccgcagtcatctcctgaccgctgtatcctttctgcacaagaacggccgctttttctttcggaatgggcagacgaacggacgaaccggcaaaataccattgcccgtgactttcttctatgacgccttttataaaattcatactcggagaaccgataaaacccgccacaaacatattcgccggataatgataaatctcatgggggcttgcggcctgctgaatatttccttcattcatgacgacaatccggtcacccattgtcatcgcttccgtctgatcatgcgtcacataaacgatggtcgctttcaaacgctgatggagcttgctgatttcggcgcgcatcgtcacacgcagtttcgcatctaagttggaaagcggctcgtccatcagaaacactttcggctcccgcacgatcgaccggccgagcgcaacccgctgccgctgtccgcctgaaagagccttcggtttccgcttgagcagatgcccgatttccaaaatatcagcggccgtccggactcgctctgcgatttcttttttcggcagctttctgagcttcaaaccgaacgccatattatcaaacaccgtcatgtggggatacagcgcgtaattctgaaaaaccattgcgatatcacgatccttcgggggcagatcgttcaccgcgtctccatcgatataaagcttcccttcagaaatgctctccagtccggcaatcattctgagtgtcgtagatttgccgcagccggagggaccgacaagcaccagcagctcctcatcctttacatctaagtgaaaatccttcactgccgccgattgggcgccgtatgtttttttgatatggtcaaatgttaatgatgccattcgaaacctcctccaatactggaaaccgccacatctttctgttatgttaaaaatgttcggggtttctgacagattcataaatgaaaggcaaatttgtattataacatcataatacatataatagtactactacttgacaaaggaggtccgtcccattgttaaataacgggagctcgaaacctttatatattcagctgaaacaaattatcgcggacgatatcaagaagggcgtttattcgccgtccgtaaaactgccgactgaaaatgagctgtgcgaaacgtacaacgtcagccgcataacagtcaggaaggccatccttgatcttgtggaagaaggctggctcgtccggcagcagggaaagggaacgttcgttaaaagccctaaactgaagcgggagctcatcgcggtcaacggctactctgaatttatggaatcaacgggaaaaaaaccgaaacaccagatcctttcccatgaaatcattgaagcgcctaaatccatcgctcaaaaacttcgcgtcgcttccgaaagtcccgttcttgaattaaaacgcattttatttcacgacgaccagccgctctcattcgaaatcgcccactatccgctcagtttatttcccgacatcggcaagcatattaaaggcggcgtgtcgatgcatgacattttgaaacagcactatcaggtggtgcccacccataatacgaaactgttaaatgtcgtatacgccaagcaggaagaaagccgctatctggcttgtgatatcggggatgcgctttttgaaattgacaaaaccgcttttatgtcaaaagaacagccgatatacagttcgctgtttttaatgcataccgaccgcgtcacgtttaccattaacagcccctatgcgtaacaagtataaaaaacgagacaatgcttatcgtattctcgttttttcactgcttttcccgccgtccggcctgtagggatgcccgtaaccgaacgctccgaaccccccgcatgttttggcagccgtcccggcggccgcagtaagcgctcgccgaatatcctgatgttcgaagaaatcggtaagaaacccggcgataaaagaatcacccgcccccaatgtatctattatatcagctcttaccaccggctgatgatagacgcgttccccatccgataacaccgcgccatgttctccccttgtcagacaaacgattttcgctccgaaaccgcgggctttttcggcaagccgcacacattcactttcactcaaatcactcccggaaaaaaacgcatacgtcacatacggacagaccgcttctaaataggcttcgtcacgttttacagagaaatcaaaggaaatcggcacatggccgctcagcatcggaaggtcacgttctatcctgctgtatacgctcgtatgcagcagatcatgtccggcgataaatgagatgtcattctcctgaaaagcgagcgtcagacgcgattgcacgccgcctttatttgatccggcaaatatcctgtcccctctttcatcaagcgtgacgaccgccatcccgttttctccgtatgcccggcggatcagatcggcattcaccttctccagtttcagcacattcaatacgtgatccgccgcttcatcactgccgagaatcccgatataagaagtttcgtggcctaagcgccgggcaagcacggctacatttaacgcatttccgcccgggtaaaacgtctcctgatcctgataataatctactacattatctccggccgctatcagtttcatcttttcatcccccttatcctttcacgcttcccgctgcaatgccgcggataaaatatctctgcattaataaaaacagcgcgataataggagcagcagaaatcgtcagcccggccagcagcacgccccaatccgtctgcagcgcatctctgaactgcatcagcccggccggaatcgtccgtaaattttcatcatcgataaaaataatcgcaaacataaactcattccatgtatggtaagccgtcaaaatgcctgatgtcaccagaatcggcacgctcataggtaagaatattctgaaaaatattccgaaacttgtacatccatccagataggccgcttcctcaagctctttggaaatcgacaaaaaataggaacggatcagaatcacggtaaacggaatacgataggctgcgtacggaagaatcaatgcccaatacgtattgtacagtcccaatgactggataatggagtacagcggcacaagactgacctgcggcgtcagcatcaagccgccaagacaaatgatcagcacaaacccttttcctttaaattgaaaacgggccagcccgtatgccgcccaggcactcacaaatacggtgatgagacaagtcagcacggtcacaatgacgctgttcataaaataagcggaaatcccttggttccatgcggatacgaagttttcgggatgccagacagagggcagcgaccagctgtgctcaaaaatctcatccgagcttttaaaggcgctgaccgccatccataacagcggataagcaacggcaatgaggtagataaagagaaacagccacacagacgtttccccgacataccattttctcggttttccgcctgttctgacggcctgacgggcatgacgcaagtccgtcttttcaggaagcatcggcctactcctcctttccggtcttaaagaatttcatctgaataagcgacagagcaagcgtcagcaaaagcaccaccgtcgcgatcgcagaagcgtagcccatcatatcctttgtaaaagcgctcttatacaaaaatgtgctcagcacttctgaagcattgcccggccctccgccggtcagaatatacggttcattaaatacggtaaatgcgccggtcagcgtcatcaccacggcaacaaacgacatttctttcgtctgcggcaccgtaatgtgaaaaaactgctggatttttccggctccgtccagctgcgccgattcatataattcagcgggaatgctctgaatcgagacaatgtacagcatggcgatgtaaccgacagactgccattgagacacaaaaatgacagacagcatagcggtgttttcatcgcccagccacgcccgggtcagttcatcaagtccgacggcttccagcagctgattcaaaagcccgatttccgggttataaataaaatcaaacaacagcgcaatgacggtcatggaaatgacgaccggaagaaaaaataccgtacggaaaaacggcgaccattttcttaccaatctgtcttccagcacggccgccagaattaacccgccgccaacctggcaaatcagcgatatgaccgcatacagcacattgttgcggagtgctgtaaaaaacacgggatcgtggaacaggtcaatataatttttcaaaccgataaacgtcttttcgggttgaaatgagctccattcaaacagactgaaaaacacattctcaataatcggaatgtaaacgaacagcagaaaaaccagcgcgggcgcgagaaacagatacggaatgaaacgctttcggctgaccaaagaaatcctcatctcctttctccaaagaaatctgttctattcagatgacgctttgacctgacgcgccgctttctgcacggaattcatcacctcgcgcggtgtcattgtgccgccgagcatctgctgaacgcctgccgcatacacatcggcgatttcaacgtcaacatccatatcaaaccacggcaccattgtttcggcgcggacgatatcctgcacggcttcgcgctggatcggggtggaattgttttctgtcgccgttccctgaaccgcgctgtatttaccgacgtcttttatcagcttctctcccatttttttcgaggttaaaaactgaagaaattccatggcttctttcgggtgcttcgtttttgaggaaatcataaatccttcgggagatccggtcagtgcacggggagatcccttttcgccgctgattttcgggaaaggaaacaagcccagattgaccggttcgacgagcttaatttctgccgtttccgcataaatcatcgccgctttgccgctcgtaaactgctggcgcacgtattcgtgatcaacggagttcacgtgctttgtaaagtacggcagaagttcctgaagcttttcaagcgctttgacatagccttcgtccgtaaactccccggtttccgggctgtaatccttcgcccgcgttttttcatccaccatacgctggttcagcgtcccgatataatgagaaatggtccaaggcgcttttgtgccgaaactgatcggaatatatccgttctctttcaatttctcacagactgtgatcagttcatcccatgtcgccgggggcttcaaatgtaatgtattaaaaatgtctttattataaaagaatgatttagcgtccatttgccacggaacaccgtactgttttccgtcatgcgtaaagggtttgatttgtgactgcacaagctgtgaggaccaatctttatcctgctgatagtaagacgacagatcgagggctttatctcctttgatgaatttataagcaaaccggtcgctccatgaaaagaaaatatcaggggggctcgttgttccgagcatgactttcaccttgtctttataagaatcgtttaagaccgcttccgtttggatatgaatatccggatgagcggcttcaaaatctttgaccgcttcttcaaaatagcttttttccggctccttcggccacctgtgaaaaaacttcagggtcacttttccgtcagaggaactgctttggcttgaacaggcggcggctgacagacatacagctaacagaacgaacaggcagatgagctttttcagatgcttttcctcctttgtcaccggactataacgttatatatcattatagtccggtgaaatataatgcgcgttcttaatattcgactttccacatgtaacgccgctggcttaacggatggttccttgcttccgccagcgcatccgcatagcttctgagcacccggtttaatacgagaggagccaggtagccttttacagaatcgtcaattccggaaaaatcatatgctgccgcatcaagcacagtcagttttttgccgtatctttttgagaaggaaagcgcccgctcttcaaggggtcttgtttcgtctaagccgagcaggataataaatggaacagattcatcaatgatttcgaacggtccgtgaaaatattctccggcatgaatggcgtgagaatgaatccattgcatttccatgagaatgcagatgctgtaggagtaagcgacgccgtagttcgcaccgcttgccatcgtgtaaatgatatcttctttttcgtgggctttcgcgaatgcctttgcgtgatccgcttcttgtttaagcgctttgtcatatacggtctggagtttattgagtccgtcgatcgcctgctcaaacgcgggatggttttccagcacgtgtaaagcgccgaacacgatttgatacagaaccccgtaattcgtatttatcgcctgtgcgttctcaccccagtcatacaccgcgacatattcggcttctttcgctaacggcgaatcaggctcaaaggtcattgcaatcgtaagcgcgcctttttttctggcgaaaccggcggctttcaccgtttccggcgtattgcctgactgagaacataaaatcaccagagagttctctccgagctgaatgggattgcgctgaataaattcatttgaactgtagagatcagagctgatggctttcgcctctctgtcaaacacgtacttgctcggatacataatggctgaagaacccccgcaagcgacgaaaaagacgtggtcaatcgtttttcctttcagatcatccaagaaagcctgaaccttgtgattcacttgtgcggcagtttgactcaaatccttcactcctcagtgttttattatataatgttatataacattatataacgttatattaatcgcaacaaaggtgcgttgtcaatcatattttctgaaatttctaaaatatagaataaacccgtctaatttcccgccctttcttgacctgacccttagagacacgtttagaatgaaaagcagggagtgattcagaatgaatataaaagaagccgccaggcagacgggtctcacgaaaaaagccatcaaatattatgagcaggaaggtttaatcaccgtcagcaaaaaccctgataacggataccgtgagtattccgctcagaacgtgaatacgctgaaaatgattgccgccctccgaatgctggcactgtctgtaagcgatattaaagcgttcctcttagagggcagcagtctgcatgatatactgcgccagcagcatcaaaagctcagccggcagattgaagagcttgagcaggaacggaaactgactgaaatgctgatcaagcgcgtggaagatgcggaaaatgtcgattcaattctgcatgatatcggcgaggtcaaaatagatgaaccgaagtatatgggacttcagctgaaaaaactgttcccgggagatttcggagaatttatcgccgcgctgtttgaaccgttcctcgacttttctattgatacagatgagaaaaaaacgatatgggcaaagcttattaaagtattggatgatatggaagaagttccggctgcacacccgatgatgcagctggtcggtaaggaggacccggctcagctccaacagcacaaagtccagcatgaccaatttatcgagcggattttggagagagaccccgccacttgggacactcataaaaacatcatcattcagcttgtgaaaagagtggagacagatgaagagtacagagaaagcctgatcaagatcggagaatccgcttctgatctgcccgcgctgaaggaaggatcgcctttcagcaatctacttcaaaagctcagcccgaaatatgacacgtatgtgcgacttcagcttgaactgaaaaaagaagccgacgaggaactcggctttgattcagaagcatatttaaaacagatgcttcaatcaaaaaaacgctaaggctcgtctccttagcgttttctttcttcatcctcagtgctgtgcgttaatgcggtcaacgacattagcgatgagctgctcttttcctaaatcggaatcttcgtcaacgcttgctactgtcaaaatgatggccgctaccgcaagagcgatcgtctcaatggcggccgccgcgtttaaaaatacccatacagcacacagccatcaaataaatactgaaaaatgaactttttcacactaaaatactattataggtaaaaaagggagtgttcatatgtttttgatgaatgataaggtgctgtggggagctgtggttctcgcctttattctgtcgattgtgttttatccgtttcttcctgctgatatggccattcactatgacgtgtcgaaccgtccgaatacatcaatcaataaaacggccggcgtcctgatttttcctgtgctcatgatgatctgcatgttattcagaaaaaaggtcgttcagctgttcctcgtcgtttactgtctgctgatcgtgcatattgcagtgatgtggctggcactgtaaacataaagaaaaccggagcccttaagctccggtttttcttatttataaaatactttctcaatgttgtatttcgactgaagggtattgatcgcgtacgtttcgtaaatctccctttccatcggatcattgacgacacatacttcaattttatacacttcgtccctgtgatgtttaacaggcgacacattgtcttcaaaatgctttttgattctttgtcttaatttacgggctttcccgacaaacagcagttcatcatgaatgttataaaacataaagatgccgcctttgtctctcggaatgcggtgaaaatcaatgaaaccgtaaatcgctttaatcgccggttcattttccgacggtgactgctgccgttccgtaatcgttacatcaggagcaggaaggtttatttttatcaaaatgggtcacgtcctcttattcattaaagctccatcctatcataagaatgcgccaaaagctattttttattcaagcgccccggccggatcataaaggctcaaatcaatttccgtctgctggccgagtgcgagtttcgccagttccgcccccagatacggcccgctcgtcagccctgaggcgcccagcccgttggcaacgaggagtccgctgatattcggcactttgccgatgacgggaagaaaaccgggagtaaacggcctgaaaccgactcttgtctctatcacagtactgtctgaaagccccggcgccacagttaatgctttgtcaaaaatctcgcggaggccgccggccgtcacccgcaaatccatgccggtatcgttttcatgagtcgcgcccgctatgattctgccgctgtcaaaggcgagaatgtattgatcgtttgggggcatgacgacgggccagccgcccgtatcctctccctgaagctctaaatgaacgatctgtgccttttggtatgatactgaaaaacggatgccgagcggttcaagcagctctctcgcccaagcgccggccgttacgagaacctggccggcagtaagcgtgcgttctgcggttttcacaccgataacggcaccgtcctctgtcaatattgacgcttcttcattgtaaacagccgcgccgtgattaacggccgcgtttaacagcgccttacgaagcgccctcccgttcacccgggccgcgccgctgacatgaaccgccccgtattcctccgacagcgcggggaacagcgccttcgtttctgccggagtcagtctcgtaatgtcaccgatttcaggagcgtcctctcttcttttataagctctttcctccatttggctgagctttttttcatccgtatggagactgacggcaccgaccttttgatagccggtgtccgtttctccgtcagcttcaagctgctgtatcaattggttataatagcgggctccgccttttgcgatcgcataccatgcctggttgcggcgctgcgacagccacgggcagacgatccctgcagcggcgtcagtcgcctgccccgggtgtttcctgtcaaagaccgttacatccgcaccggcctttgcgagatgataagccgcggacgcaccgagaatgccggctccgataatcatataagacttcatgtgtaacaccttttctatctgttttgtcttatttattttaacaaatagagcgcccggttcctaccggagtcctgacggcaatgataagtttcgaaaacggaaacgtataataaaaggaatacgttcttgtctgaaagccgttttcctcaagaattgctctgtattgtgatgtattttttatatctgacacggccaatgtgccgccaggcttcagcaccctcaccatttccgtgatcgcccgttccctctcttttctgcctgaaatgttgtgtgctgaattgaaagctttcccgagcgggatggtaacggaaatcaatacgtatgagaatatttggatagttcctgtgaacttgtgcttctcatcgcagattgctcgtatgtaacgttatattgcaaagatccggacatgctcgaagccctttttcagcaggctgtacaatgcgggtttcaccgcgttgactatgttacagataagaatgatgcgagaacgggattgtctgtctggtgaaggtggtgcgttctttttatgaagcgctggatagggcttaggattcaaaatattgacaaattcgtgtgttttcaacaaaaaaatcaccccctcatgtatactgagtgcgtaacttacatatgaaaggggtatggcaatgaaaatcaatttgaagaaaaaagcaggtttttggaagaagacggcggtttcatctcttattttcaccatgttttttaccctgatgatgagcggtacggtttttgcggccgggctgaataaggatcagaagcgccgtgcggaacagctgaccagcatttttgaaaacggaaagacggaaatccaatacggatatgttgaagcgttggatgacggaagaggttacacttgcgggcgggccggctttacgacggctaccggagatgcgctggaagtagtcgaagtatatacgaaagcggtgccgaataacaaattgaaaaagtatttgcctgaattgcgtcgtcttgcgaaggacgaaagcgatgacatcagcaatctgaaaggattcgcttctgcctggcgctcacttggcaatgataaagccttccgcgctgcccaggataaggtaaacgacagcttgtattatcagccggcgatgaaacgttcagaaaatgccggactgaaaacggccttggccaaagcggtgatgtacgatacggtgattcagcatggtgacggtgatgatccagactccttttatgccctgattaaacgcacgaacaaaaaaatgggcgggtcaccgaaagacggaacggacgagaagaaatggctcaataaattcttggatgtacgctatgacgatctgatgaatccggcagatgaggacacccaggatgaatggagagaatcggttgcccgtgtcgacgttttccgcgatattgtcaaagagaagaactacaatttaaacgggccgattcatgtccggtcaagcgaatacggaaatttcactattcaataaacaaaaaaaccccgccatatggcggggttttactattaaccgatggagccttccatttcgaacttgatcaaacggttcatttcaactgcgtattccatcggaagttcttttgtgaatggctcgatgaagcccataacgatcatttctgttgcttcttcttcagaaataccgcggctcatcaagtagaaaagctgttcttcagaaacttttgatactttcgcttcgtgctccaatgaaatgttgtcgttcaggatttcattgtaagggattgtatcagaagttgatttattatccataatgagcgtatcacactcgatgtttgaacgggcgccgtccgctttccgtccgaagtggacgataccgcggtatgttacttttccgccctgtttcgaaatcgattttgatacgattgtggatgacgtattcggtgcaaggtgaatcattttcgcacctgcgtcctgatgctgtcctttgcccgcaagagcgatagagagcgtcatgccgcgcgcgccttcacctttcagaatgacagccggatatttcatcgttaatttagaaccgatgtttccgtcaacccattccatcgtcgcgttttcttcacaaaccgtacgtttcgttactaagttgtaaacgttgttcgcccagttttgaattgttgtataacggcagtagccgccttttttgacgatgatttcaacaaccgcgctgtgaagcgagtttgttgtgtacacaggagccgtacagccctctacgtaatgaacgcttgcttcttcgtcaacgatgatcagcgtacgttcgaactgacccatgttttcagagttgatgcggaagtaagcttgaagcggtgtttcaaccttcacgcctttaggcacgtagatgaaagatccgccggaccaaacagctgagttcagcgccgcaaacttgttatcagtcggcggaatgactttcgcccagtgctcgcggaaaatgtcttcattttctttcagcgcgctgtctgtgtctttgaagacaatgccttgcgcttcaagatcttctttcatattgtggtacacaacttcggattcgtactgtgcagaaacaccggcaaggtatttttgctcagcttcaggaataccgagtttgtcaaatgtctgtttaatttcctcaggcacttcatcccaagaacgctctgaacgctcagacggctttacgtaatacgtaatttcgtcaaagtttaaagagtttaaatccccgccccactgcggcatcggcatgttgtagaaatgctcaagagatttcaggcggaaatcaagcatccattgaggctcttctttcatgcgtgaaatttcttctacgatttcttttgtcaatccgcgctctgaacggaaaatggaaacgtccttatcgtgaaaaccgtacttgtattcaccaatttcaggcatttttttagccatccattttcactccaatcttttaattgccgcctttttcgccagcgactcctttttcaagtgctttccatgaaagggtggcacatttaatccgggccgggaatttcgaaacgccttgaagggcttcaatatccccgagatctattgagtcgtcatactctttcccttgcatcatgtctgagaaaatcttagacatggaaagggcggtatcaatatcttttcctttaatggcctgcgtcatcatggaagctgaagccatggagatggaacagccttccccttcaaacttcgcttcctgaacggtatcgccgtcaagcttcattgtcagtctgatccggtcgccgcaagtcgggttgttcatatcgacgacgatgctgtcatccaaaacccctttgttgcgcggatttttgtaatgatccatgatcacttgtctgtataatgtatctaaatttgcattaaaagacatttgtaaagtactcctttgtcttttggagggcttccgcgagcttatcgatctcttcctctgtattatacagataaaaactcgctctcgcagtagcagatacatccagccatttcatgagcggctgggcgcaatgatggccggctctgaccgcaatgccctcagcatcgaggacagtcgcgacatcatgagggtgaacctcatcaagattaaatgtcacaagtcccgcccgctctttcggaccgtataccgtcacgccgtccagctgctcgaaacggtcaagcgcataggctgcaagcttatgctcatgccgggaaatctcgtcgagtccgatctcttcaagaaaatcaatcgcggctcccaatccgatcgcgcctgcgataatcggcgtgcctgcttcaaatttccacggaagctctttccaagttgattcataaagccctacaaagtcgatcatttcgccgccaaattcggccggttccatattctcaagcagttctttcttgccgtacagcacgccgattcccgtcgggccgcacattttatgggaagaaagcgcgaagaagtcgcaatccaggtcctgaacgtcaattttcatgtgcggtgtgctctgcgccccgtccaccacgatgacagcgccattgtcatgagcgattttggcgatctctttaatcgggttaatcgtgccgagcacgtttgacacatgagcgactgccacgatcttcgtatggcttgtgacagtctgccggacgtcgtccagcgaaagcgtgccgtcttcctgcatcgggatatattttaaagtcgcgccggttgcttttactgcctgctgccacggaatgatattcgcatgatgctccatttgggtgatgaccacttcatcaccgggttttaagctggcgcgggcatagctcagcgccaccatattcagtgaagttgtcgtgccttttgtgaaaatgacctcagccattgacttcgcattgataaacttacggactttttcacgcgcaccttcatagccgtctgtcgctctcgtgccaagagtatgaacgcctctgtggacattggaattgtatttgctgtaatactgatccactgcttcaatgacagcacgcggcttctgggaagtcgccgcgctgtcaaggtacacgaggtcatgtccgttcacttgctgatgaaggatcgggaactgttcacgaatatcggtgatattcattattttactttcctttcgatgacggagacgagctgtttcttaactccttcaatcggaagctcttttaccaccggagcaaggaatccgtaaatgactaagcgctccgcttcttctttcggaattccgcggctcattaagtagtaaagctggatcggatccacacggccgacagatgccgcatgtcctgcagttacatcgtcttcatcaattaagagaatcgggtttgcatctccgcgtgctttttcactcagcatcaggacgcgggattcctgttcagcgtttgctttagacgcgccgtgctcgattttgccgattccgttaaagatggaagatgcggcatctttcatgactccgtgcttcaggatatagccttcagaagccttaccgaagtggatgatctgcgtcgtaaagttttccgtctgttctcctcttccgacaactacggttttcgtatcgccgtatgtgccgtctccgtagaggtttgtcgtgttttcagaaatcgtgtcgccgtcgttcatcagtccgagcgcccactcgattttgctgtctcgtccgcgcgcggctccgcggcggttgacgtatgttgtgacacctgctgacaggttgtcaacggcgccgtacgtcacgctggcattatcacctgtgaccacttcactgataatgttgaataccgcttctttcggattcaccgtgctgatgtagttctcaacgtaagtgacggagctgtggtcttcagcgacgatcagcacgtggttgaacaatgccgtgtcattgctttcatgaacgtaaacggcctgaacaggcgtctccacctgaacgtttttaggaacataaaggaatgccccgccgttcattaatgccgcatgaagcgcagtcagtttatgctcgtcgacctttacgccgtctttcatgaagtatttctcaacgaggtcgctgtgctcacgggcagccgttaagatgtccgtgaaaataacgcctttgtctttcagttcttttgaaagagaaaggaaagcaggcgtttgatcacgctgcacatataacgttttatcttcgttttcgatatcgatcagcgcttttgcttcatcagctaaatcttctaaagaagcaagcggcgcgttttctactgtatgcttgttgaactttgtaaagttccaatttgtgatttttgttttatcaggcttaggcagcggcagatcttcagctttttcaagagcctgtaagcgcaggtttttcagccaggcaggttcttgatgcttttcggaaaagcctttgacatattcctgatctacggatagtttcgtttccaatgtcatgattatccccctaacgcttacgcttcttggcctacagtttcgtcttcaatgcctagttcctgtttaatccagtcataaccttccgcttcaaggcgctgtgcaagctccgcgccgccggatttcactacgcgtccttgcatcataacgtgaacgacatcaggcgtgatgtagttcagaaggcgctggtagtgagtgatcattaagcagccgaagttttcgctgcgcattttgttgattcctttagaaacgactttaagcgcatcgatatcaagacctgaatcgatctcgtcaagaatggcgattttcggctcgatcatcataagctgaaggatttcgttgcgttttttctccccgcctgagaaaccttcgttcaggtaacgctgcgccatttcagggtccatttcaaggaactccatgttttcgtccattttgcggatgaatttcataagagaaatttcatcgccttcttcacggcgtgcgttaatcgcagagcgaaggaaatcggcatttgtcacaccgctgatttcgcttgggtactgcatcgcaaggaaaagacccgcctgagcgcgctcgtccacttccatttccagtacatctttgccgtcaagcgtgatgcttccttttgtaacttcgtatttcgggtgtcccataatcgctgctgagagcgtggatttaccggtaccgttcggccccatgacagcgtggaattcgccgccttttatttcaaggtttacaccttttaagatctcttttccttcgatttcaacgtgaagatccttgatcgttaatgttgaagcagccatatctatacctccaaaatatataatcattattctcaatttattctcattctaattttataacaaatgaaaagtaaatacaactttttatattacccggaacattcctaaagtttatcaaagatcaaggcgtaattaaagctgtttgaaacagaaaaagggcggaaatccacccttttttactgaccgattttctcattaagctgcgctgcgaggaacttgcttttttgatattcaagctccctctgccgttcgacttccatcctttttgaaagacgccgtccgtattcctcgtagccgatgccgtgtgacttctgcatcgctttttccatttcaggcgtatagtcaaggtccagtctctcgtggctggtgcagataatgaatcaatcccttcatatatttgtttctattgtaacaatgatccgctgctccggccaaagagggtgtgcccctgaatcctttcgaatgtgccggaaaccggcgctcgctttatctgaaaaacggtattcacacgattgctcattctaatgcgtcgtatgtccgaattcctgaatacactgctgcacgagggtcactccctgactgagagccgcgccgcccccgaatgccgccgcgacgctgatgacctcaaggatgttttcttctgtggccccttggtcaaggcagcccttcgtatgataaatcatgcaaaattcatcttgagcgctgatgctgatgcccagagcgattaattgtttctctttttcagttaatgaatccgctgagaaacactgctcagtaaattcattaaacttccgccccatcatgggcattttttgctcgaatatgcctaaaccttctttatattgtttcaatgcgtcatgcacgctttttccgttatcctggtattgagccactgccattccctccaatcgttaaccttcctttttattatggacagttctccgattaatacccgaaaaaaaccccggatgattcatccggggttttcgctttattcagatacgggaagcacggctccgtcgtattttttctcaataaagtctttgattttcttagagtgaaggacttccataagcgctttgattttctctgatttttcgtcacctttgcgtacggcgatgatgtttgcgtacgggttgtttttcgttgattccacttgaatcgcatcttttaacggattcagtttgttttgaatcgcatagttgacgttaatgaagactgcatcgccttcttcttcattatatgctttcgccgttaattcaggggcgatttttttgaatgtcaggtttttcgggtttttcgtaatgtttttcgtagtcgcttcaatcgtttttaccttcggatcaagtgtgatcagtccggctttttcaagcatcgccagcatacggccttgttcagcgacattgttagtcatgatgatggtcgcgcctttaggcaggtctttcagtgatttgtattttttcgtgtaaactccgaacggctcaaggtgaacggctccggcattcacgagtttgtaatctttattttctttcatttcctgttcaaggtaaggaacgtgctggaagtagttcgcatccacttcattatcagctaacgctttgttgtacattttgtaatcgttcagcacttttacttttaatgtgtagcctttttccttcaagagcggttccgcttcttttaagatttcagcatgcggtgtttttgtcgcggcgacaacgatttcctttttattcgagccgtttgatccgcaggcggctaaaactcccgcgaacacaagcagcagcgcacttaatacaatctttttcaatgtaaatcctcccttatcttttgtctattatatttgtaattacatcaccgataatctgaatgataaagacgatgatgagtataaatactgtcgctacaaacgttacatccgtattattggactggtagccttctacatatgcaaggtttccgagtccgcctgaaccgatggcgccggcaatggcggtagatccgatcagggcgatggccgtcacggtgatgcctgaaattaacgcaggcattgattcaggaatcagcactttgaagataatcgtcgatgtctttgctcccattgatctggcagcttcgatgactcctttatcgacttcccggagcgcaatttccgcaagacgggcgtaaaacggcgcggagccgataatcagcgccggcaatgcggcattcggtcctaaaatcgatccgaccagaatcttagtaaagccgagaagcagaataattaaaataagaaacggaatagacctgaaaatattaacgaccgccgcaatcacggtgttaatgattttattttcccataagcttcccttgcccgttaaaaagagcagaagaccgagaatcgctccgatgataaatgaaaaaactaaagcgatgaccgtcatataaagggtctcatatgtggccgtccacagctcggttatatcaacgttcgggaaccatttttcaaacatttgtgatcacctctgcttctacctgtttgtctttgatgaaccggatcacgttttctacttctttttcctgaccgtcaatatgaatgaataatgaaccgtaagctccgtccttcgtctgtgaaattttcccctgcagaatattgacgtccacatcaaagtttcggatcatttccgtaatgaggggctgctcggcggcctgcccgacaaatgaaagctgaatcgttttccctgtcgctgtttcctgcagaaaatgctggatggtttctttcgtctcctccggttctgtcacctgctgaacgaaacgcttggtcatcggttcgcgcgggtttctgaaaacttggagtacttcgccttcttcaacgactttcccgttttccatgacggcgactctgttgcagatttttcggatgacgtgcatttcatgggtaatgagcacgatcgtcagaccgagtctgtcatttatatcggataaaagatccaaaattgaatcggtcgtctgcggatcgagcgctgatgtcgcttcatcgcacagaaggactttcggattattggcgagcgcccgggcgatgccgacacgctgcttttgaccgccgctcagctgcgacggataagatttttctttcccctctaatccgaccagtttaatcaattcatcagcgcggcggacccgttcgctttttttcacgccggcgatttccagcgggaacataatgttctcccggacggtgcgcgaccacaaaaggttaaaatgctggaagatcatgctgatttcctggcgcgcttttctcagcccgcggctgcttactttatttaattccgtccccgcgacttccacggttcccgacgtcggcttttcaaggccgttcaggagacggattaaggaacttttaccagctccgctatatcctataattccaaatatttcgccctttttgatatcaagagtgacatcttggacagcattgacatccccatgcttcgctttgtaaatttttgaaacattttgaagatggatcaaagcaatcacccgccttacactattctaagaaatcttccgggtttctccgcaaaagaaaagcctttctgcaaaaatgagcagaaaggcttattgaaaaaggcctttctctcatctttcaaagcagaccgctttgagtgaattggcaccatttcaacattgttgatggttgccgggcttcatagggcacttccctccacctctcttgataagagaaaacatatcgtattttcgtccggaaattcttactgtagaatagcacggcgaatgataaaaagtcaataaaataaatattggaagctattgtcacatagtagattggcagttacggccgtttactgatcgcctgaaaaaatccgtttgtcagccagaggatggcctccagcttcagcagggctctgaatgatcctttcactttgagttttccgctttggataagcttttgcaaagagacatcaccatgcaggagatggatgatttccgtctggtttccgtaaaaggtcaaattagatttctcctttgaagccgacgtttttctcatttctccctgtccgttaattgagaccgttaaggcttctgtttctccttggaatgtaatcagcagcgttgaggcgtttaatagcggtttcaaaaacagatgctgtccgtcattctctgaaacttctattttctccactcgtataacctcccgttttaatggccatacatacactttctctttttaacggacagaaccctttataaaccgcacgacattttcctgtaaatattgtcacatcgggaacgtttgcgatgttttttgtttaatcagctcatataaataggaaacggagcggaaggcgtatcctttctcaacaagctctccgcctttaaacagcaaaaagcacggaacgctttcaatctgataggctttggcgaatgcgggggaataattcacgttgtttttatagaaggcggcaccgggcagcatttcttcgacgacagtaagcattttggacgccagctggcatgtgccgcaaaacggggtgtacaaatacaggagataaacgtcatcctgaatcgattcgagttcattttcttggagttctttcatgattaccacctcaggtcgttctttttcaaaaatacagtgtcagcatcaaagccggctctgatcagcacagatgcgagatgatggcccgggcacgactcgacttgcctgtatgttctgtctatataaatatggcgcgcttcgggaagctcccgtttcagctgttttcttaatttttctccggagtcatctgcgtccgttaaaatatagacgtctctgtcaaacaggcggtccgccaactcttccagttcggtttggccgatcgtcccgtttgtacagacgatttccgcgggttcgatgagcacttccctgactttgattttatcagattttccttctacgataatgaccttttcatctccgttgtacataagcgcgtcacctgccgattgttttagcgtcagattgaaaaagaaggcagtgaaattcaccgccaactgttaacaccagccattctcataatcgcaatcgacatatttcggatcgctgccgtttatgacatcggctgttttataaaatttttgattttcaaatgaaaagccctgtttgagctcgtactggtccatgcctgtcatctcgccgatggcttcattttcatgaaacaaggaaaaccggccgttttgaaagcggcccgtgacgttctccgtcacatcgaccttttgtttatcaaaagccattttagacacctcccgttacagatagagtgtccaaatggcccctttgctatccgatcagtcttcctgtgtcatttcgtcatattgctcagaagtcatgaggttttcgatttcttcagcatcagccggttccacgacgatcatccacgctttttcatacggagactcgtttacgaattcaggactgtcatcaaggtcttcgttcacttccgtcaccgttccgttaatcggtgcgtacagttcggatacggttttgacggattccacgctgccgaatggctcgtccgctttaatttcggcgccgacttccggaagctcgacaaatacgatgtcgccaagttcggcttgcgcgaaatgtgtaatcccgatacgggcttttccgtcctcaactttgacccattcgtgctctttggaataacgcatatctttcggtgtgctcatctaaatccctccatttttttcttataataagaagataccataattctttgaacctggcattacatccaatatttttcgaattggtcttctttaaagccgacagtgactttttcgccgtctgtcgtaatcgggcgtttcaggagcataccgtctgatgccagaagttcgagctgttcatcctctgacatatggtacagtttttcctttaagttcagctcgcggtatttcattccgctcgtgttgaaaaactttttgagctcaagaccgctcttttcatagaggtctttaatttcttctttcgacggagtttcctccgcgatatgtatttcgtttatttccttaccgcggtcttccagccattttttcgcattacggcacgttccgcatttagggtaccagtaaaaatttaacgacatcttcttcaccccttgtaaatgatcgtcgttattttaacacaatcacttgtaaaaacctataacgttgcttcatgaaaaagcgcccctgatgaaggagcgctttcagcatgtgatcagactgtatatttttcttcacggaagacggctgctgccgcttcacgttttttctgaatgaggtttttcggcgtcaggcgcgtcagtttgcgcagcacggaaagcatcatgcggagggaatctccttcctccatggcgatcagtgattctttggcgtgcgcttcaatgttctgaagggcttcctgggcaaagatttccgtatataacagcttctgcgcggctttttcggcaccgtccgccgcaattgctttttccgttctgaggacggcagattccaaagcatacagcgcgctgacaatatcggcaatgttcaccatgatttcctgctcgccttcaatctctttgccgtatttctgcgccgcgagacccgctgtcaagagggcgatctttttcgcctgtctgacaatgtatttttcctgttcaagaggttctgagcccggctcttcaggcatcagcatcatgagttcttcttggagcgcttttgctttttcaaagagcggcagctgaccttttacggcttttttcagaaacgtgctcgttacgatcaggcggttgatttcatttgtgccttcaaaaatcctgttgattcttgagtcgcgataggcgcgctccacttcatattcctgcataaatccgtaaccgccgtgaatttgaaccccttcgtcggcaatgtaatcaagcgtttcagaaccgcacattttgttgagcgagcattcaatcgcgtactcggcgatggacttcgcgacttcgcgtccgtctttttgctcctcttccgtcagtctgctcatattatcttcgaataagcccactgttctgtatacagagctctccatggcgtaaagccgcgctgacatcgtcgcaagcttttcctgagtgagcgtgaagcttgagatcggcgttttaaattgccggcgctggtttgcataagcggcagacagctcaatcacccgttttgaagcgccgattgtgccgacggcaagcttgtagcgcccgatattcaggatattaaaggcgatgacatggccttttccgatttcgccgagaagattttctttcgggacttccgcctgatctaaaatcagcgttcttgtcgatgaacccttaatccccatttttttctcttccggtcccgttgatacgcccggatagttcttttctacgataaatgcggaaaacttatctccgtccactttagcgtagacgacaaagacatctgcaaaggcggagtttgtaatccattgcttttctccgttaagaatatagtgtgtgcccgcttcattcaaaacagccgtcgttttcgcgccgagggcatctgaacctgaaccgggctcagttaaggcgtatgccgcgattctttgtcctgaagccaagtccggcaaataggtttttttctgttcttccgttccgaagaacacgatcggcaatgaaccgatcccgacgtgagcgccgtaagatagcgaaaagctgccggcacgtgaaaacttttccgtaatgaaggctgaactgattttatccaggccgattccgccgtactcttcaggcacgtctgctccgaggaggccgagatctccggcttttctcagcagtctgaccgaatgctcaaactgatggttttcaatttcatcgatataaggaagcacatcgtttacgacatagtcttctgtcgttttgccgatcattttatgttcgtctgtaaagtcctccggagtgaatatttgatcatatcccgtctcttcaatcagaaagctgccgccttttttgacgttgaccgtttcctgtttcatgttcatttccccctttttttaaatgagttcaaatacgccggcagcgcccatgccgcctccgatgcacatcgtcacaacgccgaattgctcgtttctccgtttcatttcatgaatgagtgacagggtcagcttcgtccccgtgcagccgagcggatgtccgagcgcgatggcgcctccgttgacgttcaccttttcttcatctatcccgagcgatctgatcacttgaatggcctgtgaagcaaaggcctcattcaattcaaaaagcccgatatcctgtaattcgagtccggcaagcttgagcgcccgcggaatggcttcaatcggaccgatccccattacttcaggcggaacgccgcctacggcaaaggaacggaatttgacaagcggggccaatccaagcgacgatgctttttcgcgatccatcagcatgacagccgccgcgccgtcacttgtttgtgaagagttcccggccgtcacggttcccgtttttgaaaaagccgggcggagcttcgccaagacgtcagccgacgtgccgggacgaacgccttcatcctgagaaaaggtaaattgttttttccgcggcttatggtcatcaccgacttctgtcagcgatacttcaaccggcacgatttcgtcattgaatttcccttccttaagggcttttgcggcattctgatggctgcggactgcaaatgcatcctggtcttctctggatactccgtacgtttcggcgacctgctccgccgtatgccccatgctcatgtaatactcaggcgcatgctccgccaaagcgatattcggccgtgtcacatgccccatcatcggaacttgcgacatggattccgcaccgcccgcaatgacggtatcacccgcgccgatcataattttttcagcaccgtaagcgatggattggagcccggaagagcagtagcggttcaccgtaatggccggcaccgtatgaggaagccccgccagcgcaccgatattccgagccatatttaatccttgttcggcttcaggtgttgcacatccgataattaagtcatcgatatttccttcatagccgcctgcccgtttcagcgtttcttttacacaaagcgcgcctaaatcatcaggacgaacggctgcaagcgatccttttttcgctttaccgaccggggttctcgcaccggccacaatgactgcttctctcataaacaccctcctagttccgtaaaggtttgcctttgacgagcatatgctgcattctcgcttgagatttcgcctcgccagcgaggcttaaaaaggcttctctttcaatctcgagtaaatattcttctgaaacctccgtgccgaacgggactcttccgccggcaatgacatgggccagcttcttcgcaatcttcatatcgtgatcggataaataacccgaccgtctcatttggtctgctccgagcagtaatgccgcacagccggtttctccggtgactttcacttttttgcgggcaggcggacggtatccgctgtcatataaggaagcagccagctgtttcgcatcgtgcagcaggtgatcctgattcatgctgatacggtctgccgcggacaaaatcttcatgtcacgggcttcgtgtgccgaaccggacaccttggcaagcgcgattgtttcgaaggttttaatcgctgcgtccatgagttcacttccgccgtccagataattcatgtacagctctttgtttcctccgccgcccggaataagaccgacgccggtttcaacgagacccatatacgattcgctcgccgcctgaacgcgtgccgccgggagacagacttccgtgccgccgccgagtgtcatcccgaatggcgccgctacaaccggtttagcgctgtatttgatgttcagcatcgtctgctgaaaacggcggatgacaaaatcgacttccatgaagttatcatcctgggcttccattaaaatcatcgcaaggtttgctcccgcgcagaaatgtctgccttggtttccgatgacaagacctttataattccgctccgtttcctcaagcgcattgtcaatcatctgaataatgtctaagccgatcgcgttgcttttcgtatgaaattccagcagcgcgacatcatcgccgagatcaaccagacttgcgccgctgtttttagtgataacgccttttgtttcttttaacgtctgcaggctgatccgtttcggattttctttcacagccctgtattggccgtctgaataataaaattgtgttccgttttccttcatataaaatgtttcatgaccctgatcaagcatttctttcacccagccggggagtgctgcgccttcttcttcgagccgctccgctgattttctgacgccgatggcatcccacatctcaaacggtccgagctcccatccgaagccccatttcatggcgtcatcaattgcttttatatcatcagcgatctcacctaaaagccgggctgagtataagagtgtttgcgatgtgatattccaaagcaggcgtccggcgcggtcatcggaatatacaagcgctttcattttgcctttggcaccctttgcctgtttggcggcttctaaagcgggcgtcttcattttcgagcgctcaccgtatgtcatggtcagcggatcgagttcatatattgttttaccttcttttttgtaaaaaccttggcctgatttgctgcccagccaattgtttttcagcatgtcattcataaattcaggaagcttaaacatgtctttttcagcgccgtcggctttatcatatacgttttttgccacatgagcgaaagtatcaagccccacaacgtcaagggttctgaaggtcgcgcttttcggtctgccgatcaaaggtccggtcaccgtgtccacctcgccgatgcggcagccggaagaaagcatttctcttaccgtgaccagcaggccgtacgtaccgatgcggttggcgataaagtttggcgtgtcttttgcgatgacgacacctttcccaagcgtgttttctgcaaatgaagtcataaactccagcacgtcaggatctgtttcctgaatcggaatgatttccagaagcttcaagtagcgggccggattaaagaaatgggttcctaagaaatgagccttaaaatcggcagatcggccttccgccatttttgtgacggagataccggacgtattgctcgacacgatgcttcccggtttccggtattcatcaacgagtgagaaaatctgtttttttacgtcaaggttttcgacgacgacttcaataatccaatcagcatccttcaattgagctgcgtcatcttccaaattccccgccgttatatagtcgagattggcagccgaagtcagcggcgccggtttttgcttcagcagcttttgcatggccgatcggctcagtctgctgcggacctccgggctttctaatgtcagcccttttttcatctcatcctttgtcagctcgtttggcacaatatcaagcagcaggacgggaattccgatgttagccaagtgcgcggcaattccggaccccatgacgcctgatccgagaacggctgctttctttataaacttgtgcatgagtcatcccccttgaactttgaatgaatagtcattcattttttcggcaaaaaaaatgaaacccttttcttctttcatcttaaaagattttcaggatgacttcaatagcaaatatggaatttttttaaatttttcggcttccgcatgttccatggcgcgggcgggaaacttaaacccggaggtgaagggaatggtgcgagggagaaaagatccgtcttctgccgcagtgagcgcggccagcatgaaaggaaatgcgggaccgaagcaaaaatacggcggcggcaaacggacgagccaaaatcagcaatataaaaaagacaacatggaataacatactgcggctgctttttggagcagccgttattttttgaagattcctttcagcacaaacgccgcatttgccgggcgctcggcaattcttctcatcaggtacccgtaccaatcggttccgtacgggacatacaccctcatcctgtatccttcttcggcaagctccttctggcgctccgttctgatgccgtacagcatttggaattcaaactgctcccggggaatctgatgctcgctgatgagtgttttcgtatacgaaataatatcgtcatcatgtgtcgccaccgccgtttcatagccgctcaaaagctgcagcttaatcagctgctgaaaatgaagatcggttgcttttttatcagggaacgcaacggccgccgattctttataagcgccttttacaagcctgagccgcggcttatatggcatcagaccgctgatgtcttcagctgcgcggtataaataagcctgaatgacggtgccgagcatcggaaaatccggcttgcaccgcttatacagctcaagcgtacggccgcatcttgaatagtcctccatatcaatcgttacaggcacgccgcgttcttttgcctccgtcaatatgtctctgacatgctgttccgcgagttcctcggaaatatccagaccgatggatgttaatttcagcgacagctcacaatccagttgattctcggcaatcgccctgattgcttttttacattcttccgccgtctttttcgcatccttctctgaacccgcatattcacctagataatcaatcgaagccgacagccctttttggttcagccgctttaccgttttcacagcttccgtgagcgtttcccctgcaacgaaccttcccgcgccgaagcggattccgtaagcctgggcgaattttgtaagcattttatttttcgacaaaaataaacatatgctccgcagcaaggatgaactccctcctttttcttttattcgtgtatgaatttccgatcgcagagaaagctaaaacacaaaagccatgcagattgccaagatatcattcatatatccatacagactctgatgtcaaagcaatgtattatattatcaagatattcaaacggttttaatgagtcacaaaaaggatcaataaaaatcactacttcttcaattgagttttcgagctataattccgcttcttcgttacatttcgcccaaaaaaacttataatttatatttctttatccccttataatttgaaaatattccttaaaagataattgatttataatttacaatggcttatatttaaaattgataattcagtttattgaacgtatctattaagaaggaaaagcagaatttcaaaatgataattctgctgaatttatctttgcctcacaaacatacctccaaagcattattatttctttctaatagctttacgatccttcatctttaaagatggcttctcttccctaacggaatttaaagaagggacctgcctgagttatccattcaccttattttgaagaatcactaagctcgaaacatatgaaaagagggaaccttcaattggattcaacaggaaaatctaaacgtacacttttattaattggacttattatagctatgtttttttctgctctggacggaacaatcgtaggaacggttatgcctaagattgtaggagatctcggcggcctgagcatgatgacttggctgactacggcctacctattaacatctacctccatcgttccgatcgctggaaaacttgcagatctattagggcgccgggcagtatatgtggccgggctgattatattcatgattggctcttcactgtgcggcctggctgataacatgaaagaattaattgtgtttcgaggtttacaaggtcttggcggaggcattatgatgccgatggctatgattgtcattggagatttattcacaggcaaacagcgtgccagatttcaaggcgtatttggcggtatttacgctcttgcttctgtaatcggtccgcaaattgggggatggattgtagattctttcagctggcattgggtattttttatcaatttacccgtgggaatggtagctgtgttctttattgcgatgggattgcaggccagaaaatacacgggtccgattcattttgacttcatcgggatgtttacaatgattacgggtgtagtctgtttgctgcttacactcagtttcggcggaaaagaatttgactggttatcatggcagacattttgtctgttagctttggccactataagtattattagttttgtatttgcagaaaaaaaagctgcagaaccaattctgcctatacatcttctaaaaagcagaacttttatcttcttaaatttaatagggttctttatgagtattgggatgtttgcagcaatcaccttcgtccctttcttcatgcaaggaataatcggcatgagtgcatcagagtccgggacaatcatgatgccgatgatggtcgcaatgattatctccagtattataggcgggcagctggtctttaaaatcggcattaaagcgcagattatcacggggatggcaatcatatcctttgcctattttttattatccacattagaagctgacaccagcaaattaactgcaactacttatgtagctatcatcggcttcggtatgggccttgttatgcccattattactctggcacttcaagagagtttctctaaagaaacgctcggcgtggttacttcgtcaagccaatttttccgctctatcggaggtacgtttggaattacgattctgggagcagtgatgaatgccaagtcaggaaatatattaaccgataaattagttccttttttagacaattttccaaaacaagaaaacgcattagcagctcatctcaaagacttgatcagcagcaatcctcaagtcctgctacagaggctattcagttctggttcattcgaacaatttccgcattctatagcaaagcacatcataccgataatgaagacagcgttaatggactctcttcgcagtgtatttttcgcagggcttatactattaattgccggagtattttctgcttttcttttaccaaaaataaaaataactgaaagaaaagccggcactgatctagacaataaaccggcagctgaagtccaatcctagtgccgctgctgactttcgcatatatcgaactgttaacatgaacagacattatccgaaggttttttcttctgatagtgtctttttttattgtaaatattgatgtctctcctgcaaatcgtggttattttaatttatctgtatgaaatcccgatcgcagagaaagctaaaaagaacagaattgaaggaggcgtttatatgaacaaccaagagcagcacggaaacttgccgcctgccgtcatctcaacgaaagaccatttgtatcttgaggacatgctgaactggaatctgcttgccatgaaaaaagcgcattttatggcggaacactgccagaatcagacgttaaaacaagagcttgatcagatcggccggatgcatgagaagcattatcagcacatattgggccgcttgaaccccggtcaaggcggacagacaacaacaggctatatgcaataggaggacaatacatggaacagcaaaatcaaaaaatcacgaatccgcaaacgcccgtgcccaatacggcgcaaatgaatgacagagacttggtcaatgagctgctgacgacggaaaaatacatcacggcttcatattgcacagccctgcacgagttcagccacgagtctctttatcaagatattcaggcgattttcgatgagtcacaaaaagcgcaaagaagattatacgatgtgatgtttcaaaatggctggtattccattgaagccgccgatacccaaaagcttcagcaatcgtatcagaagttccggcagaccattcagcagcagtctccctaccagcagtaaaatgaaaaaggatttgatgttttcgccaagcatcagtcctttttttatttttgcacaaaaagattgacttatcattaatccttatttatatttaactaatgttaattattttctcaaggaacaagatgaggaggagttatgaaaaacgcggatcaatatgtgtctgacatccagaaatctcttcagacgctgctgcaaaacatacagcctgaaatggtggaaagcatggcaaaacacgaggtgacgcctgcccaattatttgttttagccagcctgaaaaaacacgggagctgcaaagtttccgaaattgcggaacgcatggaggtaaagccgagcgcggttacgctgatggccgaccgcctcgaacaaaaaggacttatcgtccgcaaacataaccagcaggacagacgcgtcatcgacatcagcctcaccaaaaaaggcgaaacaaaattcgaagatgttgtggaaggacggaaagcgatactggcgcgtaacctgtccgttctgactgacgatgaactgattcagtccgtgaacatcatccgcaaagtagcggaagccgccgagaaatacgcggctgatcaaaaagaaaacgaatagaaagaggagctgccgaaacatgagcattgaaaagaaagatccaaaacgcacattattaataacgggcttaatcatcgccatgtttttctcagcccttgacggcaccatcgtaggaacggcgattcctaaaatcgtgggtgacctcgggggattaagcatgatgacgtggctgaccacggcatatcttttaacttcgacgacgatcgttccgattgcggggaaacttgcagatttattggggcgccgcgtcgtctatgtgtcaggtttattgatttttatgggagcttccgcactgtgcggaatggccagcaacatgacggaactgattattttccgcggacttcagggaatcggcggcggtgtcatgatgccgatggccatgatcgtcattggggatttgttcacagggaaacagcgtgccaagttccaagggcttttcggagcgatttacggccttgcttccgttatcggcccgcaaatcgggggctggattgttgactcattaaattggaaatgggttttctatatcaacctgcctgtcggaattttagccgtgatctttatcgcaagaggacttcaaggcagaaaacagactgggccgattaactttgacatcgccggcattttcacaatgattgtcggaatcgtcagcctccttctcgcgctcagcttcggaggaaaagattacgcatggggctcttggcagattctcggtctctttgcgcttgcgcttgccgggattgtcggattcattttcgctgaaatcaaagcaaaagaaccgattctgccgatgtacctgtttaaaaacagaacgtttaccgtactgaatctgatcgggtttttcatgagtatcggcatgttcggcgccgttacgttcgttcctttctttatgcagggaattatcggagtcagcgccaccgcgtcaggcacgattatgacgccgatgatggtatctatgattatcacaagtattatcggaggccagctggtttataagatcggtattaaaccgcaaatcatgatcggcatgctgatcatggccgtcggcttcttcttattaacgaccttacagctggatacaagcaagctcgcggctacgtgctatatggcagtgatcggtctgggaatggggctcgtcatgccgcttctcacactcgctctgcaagaaacgttttcaaaagaagagctgggcgttgtgacttcatcaagccaatttttccggatgatcgggggaacgttcggcattacggtgctcggcgctgtcatgaatgccagatcaggaagccttttaaccgacagactggtgccttacttagactcactcccgaaacaggcaagtgcctttgccgcccagtttaaaggtatgattgacaaaaatcctgaagggctgcttcaatccttgttcagtcaggaatcgattaagcagatcccggccgcattttcttcccatatcgtgccggttttgaaaacgtcactgatggattcgcttcacagcgtgtttttcacaggcctggcctttatcgctgccggattgatcctcacgctgtttgttaaatcaattaagctgacaaacaaaaagacaggcaaacaagaagaaaaggcgaaagccgtttaacaaagaaaaatcccgcggatgccgcgggatttttttatatcatctgggcctctccgtttccgaatgaccagtcttccgcctcattggaaatcgggggtgaaaattatttaataaaccttaaacatttcatagttatctttatagtacgacaaaataaagtcacgaaaatttcttaccgaagaagataacagcttatgtttcatccaagataagccgactggatatgaagcagagtgatcagtcacttttataaaattcagccccaatgttctgcaaaccgaaataggaagcaacgccaccccctgatccagctttataatctcggccagtaaatgagaatccgcctcaaatgcaatatttggggtgaaaccggctttttcacaaagcgaggctgtaaaaccgctatactcttcattattagcaagggtaataaatggttcatcggcgacaagacgtaaagaaatttcggttttacccgtaaatcggtggtttgagggcaaagccagaacaatatcttcatttaccagcatacaactttctatctcttcatcttgaataggatgacctgttattcctaaatcaatgtcccctttttttaaacttgttaggatcccgcttttaactccgatggcttggagaatttttgattgaggggagcggttgatatattcactcatcagtcctgcaaggaatctcggattagaaatagatattctgatggtgtcagacatttgatgttcctccaattgaatttccgtttgtgcattttcaatctcagtaaaaatcctgtttacatgttttaaaagaattttccctgatgaactcagcttaatatttctgccttttctctcaaacaaagctgttcccagttcattctcaagtctttttatagtgagacttaaagaaggctgggcaatctttaattgttctgctgctttagaaatatgctcagtataggcaactgtctgaaagtattttagctgcagcaattccatctgtctgcatcccccttatttatttcaataaatatatatataccttattatgtattagattaaatgtaaatgcggatgtaagataatagcatagttaaagaaaaggaaagggtgtcatgcaatgaaaattgatgtgaaagatatagcaaaaaatttaaatacaccgctaacggctcctgcttatcctatcccaaattataaatttgttaaccgtgaatatttaaatattatttaccgaacggatgaaaaagctttgcgtgcggcagtgccggaacctcttgaaattactgaacctttagtgaaattcgaagtgatgcggatgcccgatgtttccggacttggtgcctatacagaggcaggacaagtcatccctgtcagctttaatggtgaagaaggagattatgtacactctatgtatgtagacaatttcccggctattgcaagcggacgggaacttactgcatatccaaagaaattgggcgcccctaagctgtatatagactctgatactctcgttggcacattagattatggcagtcttcgtgtggcagctgcgactatgggatataaacatttcgaaatggacaaggaaaaagcgaaaagggaaatttgccgacctaattttatggttaagattgctactgattacaatggtgatttaagggtttgcgatttggtgcgcacgcaaataacgaatatagaagttaaaggtgcctggtctggaccggcgcggcttcaattatttgaacatgctctggcgcctcttgcagatttgcctgtattagaagtcgtttcagcatctcatattattacggatttaaccttaaatgcagcacagccggtttataactacttagaggaaaaataaggagacgtttacaatgagaattgcaattttaggagcaggttctttaggaaccatagttggagcatatctgtctgctggcggaatggatgtcgaattaattgattcatacaaagaacatgtagatactttaaatcaaataggtgctaaagtagttggtacaacggcatttcaggcaaaggtaaaagccattacccctgaaaacaagtcaggcaagtatgatttcatattgctcctgacgaaacaattatataatgactccattcttaaagagttactgccttttttaaaggatgatagtgtagtatgttccttgcaaaacggtatacctgaacagaaagttgcttcgatcgttggtggtgaacgtgttattgcaggttctgttgaatttggtgctacgtttattgaaccaggcgtatccagacttacaactgagtatactcaatttaaagagtacgcttttcaaattggagaattaaatggtgaaacaacagaaagaatccagcgtattaaatcggttttagaccttatcggcggaacacatatttccgataatttagttggaacgaagtggtcaaaattacttatcaataatgcattcagtggtttatcggcagcattaaacggagaatacggtgatattcttgaccatgaaatcggcattgtcagcgcagttcatatcgcagatgagacgattaaggttggacacgccaatggtgtcacatttgcgaaaatgggcggccttgatttagaatctttggaattaaaaagtgaaaatgagattcctgaacgtattcaaacatttagggcagccatggaaccatccaggcttttaagagcaagtatgcttcaggatcttgagaaaaaacgcaaaactgaaattgattatattaatggagttattcccaaaatggcagaaggtactggaatttcaacaccttttaatgatttggttgtagcacaagtcaaatgtgccgaggaatctcaaacagtgcccaattttgatacaaatataaaagcatttgaagagttattacgtatccgaaaggaaatgtgatatataggaaagagtaagggattgctgcggcggtccttttttcttggttcagcaagtaaacaaacgggtgtgttagttacattaaagttcttcgttatgaattgaacggcgcctttattgattccttttcagcaaaaaaagcttccggcacctctctttgatgccgaaagctttttattgtttttttctgtgagcttcattgagctgtttaatgtgctgtatcgcagctttgatgccctctttggcgtccgggtaggattgattccaatgtttgacgagcggcggcatgctttttgcgatatgtgtatacaaaatccactgcctgacttcttcctttacatccgggtttgtttcgccaagcaatagttcagtgtatttctcaagcaggccgtccagctgctgctgcagtttttcttccataccgtttccttccctttttcatgattatgacaatcgggcggtgagggccgcttcctgcacgatacatctgccgcgtccgtgcggaatgcaaagcggcgtgccgaacagcggatcttgcgttacctgacagttcattgcaaagacctgctgtacaagctcgcaagtgatgacttcttcgggacggccctctgcgtaaatctgtttatcctttatggcgaccagataatgggcataacggcatgccagattgagatcgtgcagcaccatgacgattgtgcgtttttctttttcatttaattcaaacagcaaatcaagaatttcaatttgatgcgtcatgtcgagataagtcgtcggctcgtcaagcagaatgatatccgtatcctgagcgagtgtcatcgcaatccatgcacgctggcgctgtccgcctgacaaggaatccacaggacggtcggccatttcctcaagcttcgtcgcttttagcgcttttgtgactgcgtcttcgtcctctttggaccattgcttcagccagctttgataagggtatcttccctgcttcacaagctgatgcaccgtcaggccttcgggagctgacggactctgcggcaaaatagcgagctctcttgccacttccttcgtcggaagcttagcgatggcttttccttctaaaagcacagaaccgcccctcggtttcatcagccgggccaatgaacgtaaaagcgtcgattttccgcagccgttgcttccgatcaatacagtgatttcgccttttggaatcgcgacatccaattcgtcaatgataacagtctctccgtaccctaagctcagcgtctctgtagaaattgcactcataccgctaaccgctccttttttgagtttcccaacactatgtatataaacaaattgcctaaacattcaacgtgagatcatgattatattgtaacagaaattaatgactctgaatatcattatcaattagttttgggtaaaaaagcagcgggcggcggttatttttttatttccgtcattactccatcgttctttttcagttttagataaaaatggtcatagcggctgtccaaattaaaagccgaaagcacctcccggacgacctcgctttcctgcatccggccgtttacggcaagttctccgaggatcatcttcatttcatcaagcgcttcctcgccctctctgtgaacccctgagagcttgtcccggatgtccgccttttcatgaccgctttttctttcatacaaaccttcatagcggttatgctctccggctccgtagctgacgcgcagggaaaagctgctgtaaggaaccggcttctcggatgacacaggtgtgctgtcttgttccgcttcccgtttttcttcattcaatcggcagccggcaatcagcatcagcgtaagacataaaacgcccgccgttctgatccatttcatgcgattcactcccattccattccgatcgtttttaggtatttccaagggaggcggctgtcattcacggaacaaaaaagaaccggagcggtaacagctccggccggttcatctccagattatcattcagtcagctctaaaaattcctgcacatcctgtacggcaaggcggaccgcgtcttcccaaaacgaccgttccgtgagatccgctccaaggtgcttcatcgccaaatcctcaacggtcatcgaagccgtgtcacacaaaagcgcgatatatttttcttcaaaatccgctttttcccgaagagctcttgcatatattccaagcgaaaataaataaccgaacgtgtacgggaaattgtagaacggcactcccgtaatatgaaaatgcagttttgacgcccagaaatgagggtggtattcccctaatgaatcgcaaaatgcttctttctgcgccgcttccatcagttcattcagtttctcagccggaacgacgccctgcttgcgctcttcataaaaacgcgtttcaaataaaaatctcgcatgaatattcataaacatggctacgcttctttgaattttatcttcaagcaagaacaccttttcatcctttgtctccgcttgtttcaaagcggcgtcggcgacgatcatttccgcaaaggtcgaggctgtttcagccacattcatagcgtaggctctgttcagctgccgcacttggagcatggcctcctgatgaaacgcgtgaccgagctcatgcgccagcgtcgatacgttcgaagcgcttccggaaaacgtcataaaaatccgggattctccgctgtcgggaaagctggtgcagaaaccgccgacccgtttgccgctgcggtcttccgcttctatccaccgatcgcggaacgctttttccgtgaatgcggacagctttttgccaaacgtcgaaaattggctgacgatcagattagccgcttcatcatatgtgtattctttcgaagcctcgccgatcggcgcgcccacatcataccagttcagccgctcaagccctaaaagagacgcctttcgattcaggtattcggcaaaaggctttttatgatcggtaatgacctgccacatgacatccagcgtttcttttttcatccgattgatcgcaagcggctcttccaaagcgcttttccagccccgcgctttatagatttccgtgcggaagccggccagatggttcagcgtgctgctgaaaagctcctcttctcctttccaggcttcattaagctctttgaacacttgacgtctgatgcggcgatccgggtgcgccatcatattttccgcttggccgaccgacagctctttatcctcaaacggaatcttcattctgccgacagccgcattatacaggtcgccccatgcgtgatagccgtcaacggccaggccttcaatcagcctttcttctgaagcgctgagcttctctctgacccggtctcttctctcatttaaaacatatgtgagatcctgaagttccggtttttgcaggagctcctcccagacccgctcgtcaatccgggcaagtgtatcgtcaagggtgaccagagcggatttaaaatcactgctcagctgattgatccgcgctctccattcattcgctttctgatcatgagtgttctgagcctgaagacagccgacgaacgctcccgcctgcctgatcatgatcgctgaccgttcaaacctatcaatcagattgatcagctcccggctttcatccgcgtgcgtcggaactgtaaatgcttcaaccgcatgttgaaaagcgcttagatgctttttgagctcttgtatgtattgctgaaactcttccgaccggctcccgccctcaaaaatggagtttaaatcccatgtttccttcaatccctctaatgccatcttttctttacccctttctatccgaagctgactccattataaaacaattctgacatatttccgaacgatttctccttctttccgcgagatgttatacactatgagataagaacaaacgacaaacggggaggattataagatgaacagaaaagttgccattgtaaccggtgcgacgagcggattcgggatgctgacagcgctgaagctcgcccggtcttatcacgtcatcgcaacagccagacagccggagaaagctgtaatactgaaagaggccgccgctcaagcgggtgcatccgcatatattacggtcgtttctttagatgtgacaaatgagcagtcggtgtctgacttcgggaacaccatcagcggtttcggaccgattgagctgcttgtcaataacgccggcactgcgtacggagggtttattgaagatgtgctgatggaacattacagacagcagtatgaaacaaatgtattcggtctgattcacgtcacaaaaaccgtgctgccttatatgcggaaacatggcggggcgaaaatcttcaatatcagcagtatcagcggactgaccggtttcccggctctatctccgtatgtctcttccaagttcgcggttgaagggtttacagagtgtctgcgcctcgagcttctgcctttaggaattgatgccgctttaatagaaccgggctcctataaaacgtctatttgggagacgtctctctccagccatattacggcgcccggcaaagactcgccttattatcgcttttatcagccccttgaagcttacttcaaagccaacgcatccaaaagcggcgatcctgatgacgtagcggagctgatttatcaattggcacaaaggaaacggctgaagaaactgcggtatccgatcggcaggggcgttaagctgacattggctttccgctcactctttccgtggtccgcttgggaatcgattataaagaaaaagctgttcacttaaactaaattataataattataatttagtattgatttttatttgatacgtgatataattaaattaacagatcacagggaggacgatgaatatgaatacacaaaacgcgaaaaaaactgaaactcttgttgagaaatcaatgaacacacaattatcaaactggtttatcctttactctaaactgcaccgcttccattggtatgtaaaaggccctcacttctttacgcttcatgaaaaatttgaagaactgtataacgaagcagcggaaacggcggacgccatcgcagagcgtcttctggccatcggcggacagcctgcggcgactttgcacacttaccttgaacaagcttccattacggatgaaggtcaggaaaaaacggcttctgaaatggtgaaatcactggttcaagactataaacaaatcagccgcgaatcaaaatttgtcatcggcatcgcagaggaacaaaatgacccgtcaactgccgacctgtttgtcggattagttgaagaagcggacaagcatgtgtggatgctgtcagcctacttgggagaatgacgaaaaaagctgaacctcagttgaaggttcagctttttttatgcgctcagcttgcgctttcagtttgtttcgttaatgtgacgttcagcgtctttttgcttccgcttctgagcacttgaacagtcgttttatcgccgattttcagctggttatataagatctgtctgatatcggcgctgctgtcgacatctttgccgttcagttgtacaatgacgtcatttgatttgatgcccgctttcgcagccggtgagccggattgcacttcttttacgtaaacacccttagacagctggtcgccgaacagtccgagcgtgttttcctgataggtttccggaacttgcgccatgtcaatcatctgcacacctaaaaacgggcgctcgacttttccttttgcaagcagctggtcgactatcggttctacatcattgctcggaatggcaaagccgagcgactccacgccgttttcactgactttcatgctgttgatcccgatgacctggccgcttgagttgattaacgggccgccgctgtttccggggttaatcgccgcatccgtctgaatcacgttcatttccaccgtgccttgggatgtatcggcgtccaccgttctgttcagcccgctgatgacaccttgtgtgacggtgccggaaaactgctggccgagcgggttgccgatggcaatcactttatcggcaatgcggagcttggaggaatccccgaagctggccgcttttttgacattggacgagctgatttccaatacagccaagtcactgatggcatcctttccgacaagctttgccgtttcggttttcccattgtaaagagtgaccgacagtttgttcgccccttctacgacatgattgtttgtaatgatgtacgctttttcgccgtcttttttgaagatgacgcctgaccccgtgccgctttccgtttcagagcttgaaccgccgtcaagtccgaactggctgctttgcgaagcttggtagttggacactccgacaatcgcgggctccaattcttccaccatatccgctacgcttgaggtatttttcaaaggcgttgacgtaaaattcgaagactgaacttgtttcgtatcagaaacggcttctgtcttatgctgctcacccggcaggttcggcacaatgccaagcacgaggcctccgccgataatgccgcctaaaatcgggctcagccaagcggctctccgttttttttcttttttcacggcagccgttttttcaaattccgtaccggcagccgtctcgttttccggttctttcgagacggtcccttcaagcagctcgggctcctgatggctgatctgctgctgttcatttctgttttgttccgtatgtgaaagatctgactgatcgcggcttctgccgtcatctcgatgatcgttcatattcacgcacactccttcagcatgttttcattctatcgattacatattcatcgcatgtacaagttctattgtcccaataataaggagaaaagcaaagctccaaaacaaaatgtgtttgaacatgttatcttccccgctttttttcttcctttcttcccttatacacatcataaacaaacattgtgggataaaaatgaaaagaatatgtgaaattatgaaaatgcggcttgagtatgttaaaactagtataatgacgttgaaaggatgtgaaatgccttgtcatacaccatttatctagttgaagatgaggataacctgaatgaactgctcacaaaatatttagagaatgaaggctggaacattacatctttcacaaaaggcgaagatgccagaaagcagatgcagccgtctccccacttgtggattcttgacatcatgcttccggatacggacggctatacattgataaaagaaataaaagaaaaagatcccgatgtgccggtcattttcatttccgcgcgggatgccgatattgacagagtcctcgggttagagcttggaagcaatgattatatcgccaagccttttttgccgagagagcttattatacgggtccagaaactgctcgagctcgtgtataaagaacagcccgccgcaaagaaaaccggcatcaccgtttcttcctacaatgtgatcgaagatgcccgggaggtttatgatgaaaccggcagcctggtcaatttgacgtctaaggaatttgatctgctgcttttatttcttcaccataaaggacaccccttttccagagaagatatcctgctgaaaatatggggccatgattatttcggcactgaccgggtggtcgatgaccttgtgcggaggctgagaaaaaaaatgcccgggttaaaggttgagaccatttacggattcggctacaggatgatgacgtcatgaaaaataagccgcttgcttttcaaatatgggtggtcatctcaggcatcctcttagccatctcgattctgcttctcgtgctgttctcaaatacgctgcgtaattttttcacggatgaaacgtatacgaccattgaaaatgaacagcatgtactgacggagtaccggctgcccggatcgatcgagcggggatattacagcgaggatgcgaccgctccgacgactttccgatccgttcagcacgttcttctgccggagcgggaggaatcggccagtgacaaagacttgaactatttttcttcttcctttatccataaggtgtacaagctcgcgggccgccagcacagcgtcacgaaacgatacagcgcggacatcagcggtgaaaaagtttttttcgtcattaaaaaaggcctcaccattaacggccaggatgcgatgatgctgtcttacgcccttgattcttatcgtgatgatctggcattcaccctgttcaagcagctgctttttatcattgccggcgtgattttgttaagctggattccggcgatttggcttgccaaatatctctcacgcccgctcgtttccttagagaagcatgtcaaacggatttccgaacaggactgggatgatccggtcatcgtcgacagaaaagacgaaatcggaaaattaggccataccattgaagacatgcggagcaagctggtgcaaaaggatgaaacggaaagaacgctcctgcaaaatatctctcatgatttaaaaacgcctgtcatggtgataaggggctatactcaatcaataaaggacgggatttttcctaagggggatctggaaaccacaattgatgtcattgaaggcgaagcagaaaaacttgagaagaaaattaaggatttattatatttaacgaagcttgattatttaatgaagcagcgggtgcaccatgagacatttgacattgtgaaggtcacggaagaagtcattgaacggctcaaatgggcccggaaggaattattgtggagcgttgatacagaagatgcattaatgatgcccggtgatccggaacaatggagcaaacttcttgaaaacattcttgaaaatcaaatccgctatgcagaaacggcgattcacattcggatcagccaaaatcagcagcagattgtcatgacggttaaaaatgacgggcctccgattgaggatgagatgctatccagcttgtacgagccttttaataaagggaagaaaggcgagttcggcataggactcagcatcgtaaaacggattttaaccctgcataaagcatcaatttcaattgaaaatgaccaatcgggtgtaatctaccgaattatcataccaaagtagactgtagtgtttcattgcagtctttttttatgtgaaggaatagccgttaaaatctctgtagtttgctttcagcggtttttggcattgatgaacccatttcttttcacaaattgtctttttcggatatttcaccttttcgactttaattcctctgtttcgcaagcggctgatcatttcatctaattctttcattttcagattcaccctttcgccagaactttgaccattcggtcagctcactttataatataaataaaacaaaacaaaaaaacaagttacaatcaggttaaatttacggaatatcaatatgaccatatagtcatacatgagaagcacaagccagcctcctggctccgaaagggtggaaccattgaaggaaaaagaaaagctgatcattgaagcagcaatcaaactgtttgcccgaaaagggtacaaatctacatcggttcaggaaatcgccgatgaatgcaaaatctcaaaaggcgctttttatctttactttccttccaaagaagcactgctcctatccatgctgaattactactatgataaaacgtttacccgaatcacgacgatccaaacggagggtgacagtccgagagccgcttatcaaaaacagcttgcggtgttttacgaatcgattctcgcccatcaggattttattaccatgcagatgaaagacggttcacttccttataccgaagaagcggcgcagtgcggaaagagaatccgccggtcgatcctgcagtttcatatcgacagtcttcttgctgtttacggagaaaaagctgaaccatacacagccgagctttgttttttaatagaaggaatcagtcagatgtatcttgaatatctcattctgaccggccggtccgtacagccttcgcttttggcaaataccgtgattcacagaattgatgacatcgtaaacggaatggcgggcagacatgatgaagcatttatttctcttgatgaggcaagctcactgtttgggccccttcataacgggcagcccgatcctttaagccaatcgatcttgcagaccctccgcacgcgcatcggcacgatggacaaggcggaagcatctgaattcaccgagagcttggatattctggaagcggaaatgaagaaaaagtcgccgaaaccggcaatcatcaaaggaatgattttgaatttgaaggaatccgacctgctggctgaagatgcagaacagctcagatttttactgaaacagcagtttatttagaagaacggccgcaatgactgcagccgttctttcttttatgctttcgggtgcaccatatcttccggacgcaccatttcattaaattgttcttctgtcagaaggttcagctgtaatgccgcttctttcagtgtcaggccttctttgtgggcaagcttggcgattttcgcggcgttttcataaccgatgtgcgggttaagcgccgtaacaagcattaatgagttagagagattttcctgaatcgtctcttggttcggctcaataccgacagcgcatttgtcatggaaggaattcattccgtcactgagcagctgcacggtctgcaggaagttataaataataaccggtttgaagacattcagctcgaagtttccttggctggccgcaaacccgattgtcgcgtcatttcccatcacttgcgcggcgatcattgtcagcgcctcactttgcgtcgggttgactttgcccggcatgatagagcttcccggctcattttcaggaatgacgatttcgccgattccgcagcgcgggccgctggccagccatctgacatcgttggcaatcttcatcaggtcggcagccaatgcttttaacgcgccgtgaacgtaagtgatttcatcatggcttgtgagcgcatggaatttgttaggcgaactcttgaatgtctgccccgttacttttgtgatttcttccgcgacgaattcaccgaactgcggatgggcgttgattcccgtgccgactgccgtgcctccgatggcaagcgcgcggattttttccgttgactcaagaatcatttctttcgaacggtcaagcatgtatacccagccgctgatttcctgtccgagcgtcagcggagtggcgtcctgcaaatgcgtgcgtccgattttcacaatatcctgataagctttcgctttttcatcaagcgtcgcgcgcagctgatcaagcgccggaacgagctgctcatatacggcaagaaccgccgcaacgtgcatcgccgtcgggaatgtatcgtttgagctttggctgcggttaacgtcatcattcggatgaatcttcagctcggaatttttttctttcaataaagcagtcgcgcggttggccaccacttcattcatgttcatgttgctttgcgtgccgcttcccgtctgccagacaacgagcggaaagttatcgtcgtatttgccgtttaaaacatcgtcacatacagcggcaatcgcctgggctttttcagactctaagttgccgaggcgttcgttggcgatcgctgtgcttcttttcaatattgcaaacgccttcacaacacgctgaggcattttttctgaaccgattttgaagttctctttgctgcgctgtgtctgagcgccccaaaatttatctgccggaactttaacttctcccatggtgtctttttcaattctgtagtccatttatgtatccctccataacagttgcttcaccctgagtattattcgccagtaacagatgaaaccctttttatttttcggccttggccgtttttaatttcagctcaagatagacgcgcgaatccttagagtatttatacttcggatttgttttacggtattctttcgacgtgtaagccacttcgtaatgcgcttcaaatgatttgatgagctgttcaatttcttcggcatttcctgccagtctgacttgtgccacatctctcctccgctttcataaaaaaacttgtaccattaaatactttatcatagtatatcatttttttaacaggaaaagataacctcaattaaggattggaaggcgggtgactgtcgatgacgcaatcggagttcaaggaatacatacacgttaatctggcactggtgcttccccacgtagagcagaatgatgacctggttcaaaataaaaagatgcttccgaacgggcttgttttttattatatgtatctgagtgaaatgaacgacgaagacaaaataaaagaggcgattgaaacgctgcttcaggaggaagacactctgacgctggatacggtggcgaaacgtcttgataagatcaacgcccgtcccgtctttacgtcgaaggaagccgtcatctccattctgcggggaaaatgcgccgtgtttattaacggacttgacagcgtatacattttgtccacgggaaaaagagaaaaaagaagcgtaaatgaacccacatccgaaaaggtcgtaagaggtccgaaaatcgccttcatagaagattctgatacaaacatcgccatgatcaggcagcgcacgaaccatccgaagctgaaaacgaaaaaggttccgatcggagaaaataagttaaaatacgccacggtcatgtacatagatgataaggcggacccgtctgtcgtcagcgatgttgtaaagcgcctcagcaaagtgaagatggatgacatccaggattccggaacgcttgaggagcttattgaggataataagtattcgccctttccgcaaatacaaaatacggaacggcctgataaagtctcttccgccttgttcaacggccgcgtcgccatccttgtcgacaactcgccgtttgcgctggtggttccggcttctttaggaattttaatgcagtctcccgatgattattatgaacggtggatttccgcctcgctcatccgggcgctcaggtttacgtctatttttatcacgctgtttttttcgtccatttatatcgccctcgtttcgtttcaccaagggctgctgccgacgtcgcttgcagtcaccatcgcggcgaacagagaaaacgtccccttcccgcctatcattgaagcgatggtaatggaaattacaatcgagctgctgagggaagcgggcttgaggcttcccagcccgctcggccagacgatcggattggtgggcggagtcgtcatcggccaggcggccgttgaagcgaatattgtcagctccatcatggtcatcgtggtcagcattgtcgcgctcgcttcatttacggtgccgcagtacgggatgggtctgtcgttccgtgtgctccgttttatttcgatgtttaccgcggcagctttcgggctgtacggcatgattttatttatgctggcgatctacactcatttatcgagacagcgaagcttcggttctccgtatttctcgccgaatggatttttcagcttaaaaaacgcaaacgactctattctccgtctccctattaaaaatcaaccaaaagaggcgaaaaacgtaaatgagccagaaaacaactcacaataagcttacaagctatcaagggacagcattgattgcaaacacgatgctcggcgcggggctcctcaccatgccgcgggcgctgtcatccagggcaaattcgccggacggctggatcgcgttatgtctggaaggcgtcatctttatctttttgatttatctcaatacgctcattatgaaaaagcatcagtacggatcattatttgattatatgaatgaaggactcggcaaatgggcgggaaatatcgtcaatctgatgatctgtctctattttataggagtcgccagcttcgaagcccgggcgatggcggaaatggtcaagttctttttattggaaagaacgcccgtgccggtcacactgtttatctttatcgcctgttccgtttatttaattatcggcggcatgagcgatatcggcaggctctttcctttctatttaacgattacgatcattattttgctggtggtgttttctttcagctttaaaatatttgatctggacaacctgcggccggtgctcgggcagggattttctcccgttatggcttccttgaccgtcgtttctgtttccttcttgggaattgagattatgctgtttctccccgagtacctcaaaaataaaaagcacacattccgcatgtcggccataggctttggcatcccgattattttatacatcattacctacgttctcgtcgtcggcgccttaaccacccaggatgtcaaaacaatgatctggccaacgatcgcgctctttcaatcatttgaaatcaaagggctttttattgaaaggttcgagtcctttttgcttgttgtctggatcatccagtttttcgccacctatgtatcatacggatatttcgcgacatcagctcttcataaaattttcgggctgaaacagaaaaaaggcatcatcttcgtaggcatcgcgacattcttcggatcattgttgccaaaagacggaaacaagctgatgctgttcagtgatattctcggctatatcttcttggttttctttttgctgcctttactgatgtttgcagtcgtcgctgtgaaaaggaaggtgaaaaaagcacaatgaagaaatacatcgtaatcatattttgcacattgcttttggccgggtgctgggacagccgcaatttagaagacttgagcctcgttatcggagtcgggctagataaacccgcggaagaaaatgtggaagtgacacagcagattctggttccgcaaaaagcaagtgcccagcagtcgtcgtcaggtgacacgacaaaggtgacttccactccaggggaaaccgtccatcaagcattaagaacggcatcgttaaaaaatcaccccgccttctcccagcacttgcgtatcatgctgttttccgaagcgctgttaaaggatgacattccgcttgacgcattgatgaaccaatttatcagagacaacggtacgagaagaagctgcaatgtgatgacggtgccggataaaacgaaagatattttcaatatcagtgaccagggagaacctgcgtcaaatacgatctatgacttaacggagaataattcggtcaccatccggatgatggagcccgtgacattgggggaaatatcagagaaaatcgccaagggcgaaacctttgcccttcctcaagtgcgcaaagtgggcagcagactggaaatctggggcgctaccattattaaaaataaattctggtatgcaaatttaacgcctttacaagtccagaatatgaacctgttcacaggcacggtaaagggaggcgtcacgtttgcaaagcatgacaattattatttatctttcgaggtattttccagcaaatataatgtaaaaacacaatataaaaacggaaaattcaagtttatcgtcacccggtttgttgaaggccgtctgtctgaggattggaatccgaaagaagattctttcaaggagtcctatataaatgaaatcaaaaacgcggtaaaacgcagcattcattcagatgttatggcattcattgattacatgcagcatgagttgaaagtggatattaccgggttaggcgatcaagtccggattcattatcctgataaatggaaaaagatatcctctgactgggatcatcacttcagtgaatcggatattgaatacaaagtcaaagtcgccatcagggatttcggaacaaagggaatgtcccaatgaccccgtccctcgggagagtgtgccggcgccgctctcctttttttatgtcacgagatgattgcggtgggcatatacggctgcctgcgtgcggtcactgacatcaagctttgacaatatattcgtaatgtgggttttcaccgttttaatcgtaatgaacaactcttcaccaatctctttattcgtcttgccttccgcgacgagacagaggatttccagttctcttttcgtcagcgtttcatgcggaagctgattctctgaatggcgcagccttgacagcacttttcccgccactttcgactcaagcttcggttcacccttggcagccgctctgatggcttctgctatttctgccgccttggacgttttcagcaaatagctgagcgctcccgcttcgatcaccggatacactttgtcgtcatcaataaagctcgtcagcacgatgattttcgggtcattgagtttcgcgcagatctgttttgtcgcttcgatgccgtccatgccgtccatgacaaggtccattaaaatcacatccggcaaaagctctgcggccagatcgacgccctgctgcccgtctgatgcttcaccggcgacttcaatgtccggctgtgcttctaaaaatgcggccagacccatcctgaccatctcatgatcatcaatcagtaacactcgaatcactgtcgttctctccttttgttttctgataaatcgggactttcacgtcgatctgcgtgccttttcccttcacggagataatttccgctatgccgccgatttcactcgctctttccttgatggaatgcaggccgtatgaggatgctttcacttgatccatcgtaaaaccctccccgttatcaatgactttaagctgcagcttttgatgtttcgcgccgagcctgacggtgaccttggtcgcctttgaatgtctgaaaacgttggaaagcgcctcctgcacgatgcggaacagatggtcttcaacaccttttgacacacccgtatcgctgatgtcccactcaatatccagcggctgcttcgctttgaactcttttaacagctcaatcagcccttcttttaagccttttccttctaaagtgacgggccgcagatgcaatagcagcgctctcatctcgttttgcgcttcccccgccatatgttcaaccatgcgaatccgtttgacgattttgtcatccgcatctttcacctgctctaagacggcggatgtcatcatagaaatggcaaagagctgctggctgacggcatcgtgcagatcgcgcgccagccgctggcgttcttcagtgatgaccgattttttcatttgatcctgccattccgcccgctcgttggagagtttttgcagcgatgtgacctggagctcgacccgcttggccatttcgttaagctgatctgccgccaggccgatttcatcatcgccgagcggcggcacccgataagcgaaattgccgttttcaaatttcaaaaccgcttcaatcagtgtatccattcttgttttcaggcggccgccgtatacataaccggaaatcaatccggccgaaagagacgccagaagcaggatgaccacaaacggaataccgaaccagccggaagaaaacagcagcatcgggtcaagcccgtaatacagcagcatcagcgtaataaacaccgcacaaaggagcagactgagccccgcagtcatccgcatggcgcgccactgaatattggcgagtaattttttcctcataaatacttcacatccacatcgccgatgaataaagaaattgaaattttaatccgccgcggcgagtcgccgtactcagacgatactttataaagattcgggctcatgccgcttttcttagagccgagcaggttcatatcgccgataaaagccgatgaactgacggacacttcgatatccggcgggacgtacacatcgacattgccgatgacaccgctgatggtcatcgtgctttctccttcgggaatcatcgcttttgacaaatcaattttcacatcgccgatgaatccggaaacatttaaatcattcagctcaaacgggtccttcatcatccggagctcgccgataaaaaagctgcggaggtccggctgtctgctttccgtctgggcggaaggctttggctgctcttctttttcaagattgattttcttctctttatgttcatacacgcgctttcctttcaggagcctgtagcccgcgtatatgagaaaggcggcgaaggcatagccgaacaggttaaaggtggcgctgaacaggttcctcaaaaataaaaaagcggcgaagatatacaggacggagccgagccagccgcgggaatatttattaaaaatatagcctgtgatcagaaaaaagagcggccaaaacaagaagtcgccgatgccgataatacgcaaaaacatgctgacgcctaataaggcgatgataagtccgagaatctgtttttttgccatcagctgcctgcccctcctttccttgactattgcagtgcaatattgccgctcgtcacttttatatcaatcggcctggcgccgctgcccttcataccggtgaatgccccgccgtccttactcgttttctcaaaggaataagacggctgaatccttccgcttgccgtctcggcgttcaccgtaaaacttccgtctttcggcaggctgatcgctgcgctgccgctcgcaagcctgacggatacgggagcatccgccatctcaagcgaggcgtcgacactgccggaagcgacccgcacgtcaagggcgcccgccgcatgttgaagcccgacatgtccggaggataagcggatatcccccgttttcgccgcaaggcctgatgctgtgaggttgcccgacagccctttcgcttcaaacacatccgtcttcacgtgcttcagcgacatattcccgcttacagaacggacgccgaggtgcgcaagagacagccccttgtttccgtcaacggcaatggtgccgcttgacgtatggacggtaatgtcccgatgataatcatacggaatgcggacaatcagcagaggacgctgaaagagattcagaaattggaaccctttctccttcgctttgagattgagggtttttcccctgctttggacaaacattttccccgccggtcccgccatgtttgccgcgatatcattccgcgcttccgcgatgatttttacatccgtctgttccgatgaaaccgacaggctgttgacggcacgcggcggtatgcttgccgattccgcttctgtttcgtacagcggaaaaaaacgcccggcaaacacttctttcaccaaaaacagacagcagatcagaacggacgccgccatcagtcctttggccatcttacgcttcattacgttccatcctttttcattcattttattataaaggaaaagccggagaattgatacgtgcgtatagggaagaggcgtaaaagcgccgatcttcccttgtgcacattattcatgagccgctttttgatgctctgttttctccagagaaagcgagcgcattttttcaatctcagcttccacctcgtctgaatattgggagcggctgtattctgtgttcgcctcagctgaagtgccgtatttgacgcggacttccatttcttcaatgcggctttccattcgaagaaactctctgtaggcgctttcactgtcaattttgtcgaaagaagcgttcatatgttccttcgcttttgccgcgttggcgcgggcgatgagcgcctgttttttatcctttacgtcgcggaggcgcgtttctaaagtttccagctgctctttcagctctgccagctgtgttttcgcctgctcatacgctttttcatgttcggccgcttttccctcaaggtatttcatttcagtcagcgcctttttcgcaagctcctcttccccggcgtcaaaagcaagctgagcctggtttttccgttttgccgccgtttcggaagcgtcttcctgttttttcttaaactgatggacgatcgtgtgctgtttgacaatcgtttgtttcgccttagcaatgtcactttccatatcacgcacatattgattcagcatgactttcggattttctaatttatcaagcccttcgttaacagatgcgacgaacatatttcttattctttttaagaccattttgtcttcctccttattttttcttcagaaattcttcccattcagagtcaaatccggattgatagcccggtgatgccgcttccggttcatactggcgggaagcggtgtctgagccgccctgcttcatcatcttccacccgaaatacaccatggcgccagccagtccgatggcaacgataaatggaagagaaccgacgagaatcatagctccgatgaagcccgcgatgatacccgataccgcccggccttttgaaaaacgtttgattccccagtaaagcatcaggcctccgatcgccagcgggatgataaatgcgaaatggcctcctccgaaaaagacagaaagtccgaacacaatcagcagaaagccgcctgccgtttttacatttatattcatgcagatcctcctttcgttttccttgtctttactataaacaaatcccgcggccggcaaaacgagtcagagattgattttcatatcagaccggagtcgtataacccccggaccttcgcataaaaaaacgccgctgcaccggacggcgcagggcgtttcacgaaaaatctatattctgatgctcgcttctttttccctgatgagatctgagcgttcagctttggccagcttcgtaaagagcaatattccgagaccggacaggacttcaacgagaccgccggcggcaatgacttttccgggaccgaaggcgttagccgcgtatccgcaaagaaccgcgccgagcggaatggatatgtttgagatcatatggatgacggcatagacttgcggctgatcatcatggtccacagacgtctgaataatcgtatattccggcacattaatcgcgctgacggcagatccgaacgcaaacgcggcgaggaagacgagcggcagaaaagtgttgaggccggtgatgaaaaatgccgccccttctatgattcccgctgacacaaacaggagaccgtatttgttcaccttcaccttagccaaaataaaacccattaaaaaggctccgcccgtgcctgtcgctttcaaaagcgagtagatgatcggcggcatgtttaaatcttcggcgacataaacggcagagagcgcctcccacggagcggccgcaaaattcatgaagatacaatagatggcgagcgggtataaaatctggtgtttcctgacaagaacgaaaccccgtttgagccttccgacatacgtcccgcgctgtctgacggcgacggtatcctctttggcatgctggacttggtatgacataaagagtacgagaaaacctgatagaagatagaatataagagcgataaacaaagaataagcgggactgataaatgttaagaacaccccgctcagcgtaatggcggcaagtctgacgatctggcctgatgactggatgaccgcattcgctttctgcaggctgttttctccgacaatattggggattaatgagatagatgcaggattataagcggctcccgtggctgaatgcaaaatcatgagaagcatgacaaaccataaaggagaaaaaccgttaaagtaacagaccggaatgatcaacacgaccgccgcgcgcgtgagatcggagaaatacatccagaatttcagcgtatgctgcttcataaaaggcccggtaatcggcgccagcatcgcctccggaaggaacgtgaccgcaatgagcagggacgtgccgatcgcgccttccccgtcaaaaatcaaaaaccacagaatggaattaaaggcaaaaccgtcgcctgacaatttaacaagcctcgagataaacagaagggtgaaatttttattccagatgctctcgctcttattatatgtatccatctatcaaatcccccattattttacaatgtttcttataatatctcattttttaatttttcagtcaataatgcataagatacattttccttctgtcaataaaggttcaattgatggatatctctataaaaaaacagccggcttgctgctgccggctgaacaaaacgttattcatcatcacggaataccgcggcgcttctttcatactctatatcctgaacgccctgtcttgcgttaactgctcttgccgccgcgaaaaaataatcagacaggcggttcaagtaacgcatcaccgtatcgtttatctcttctgttttgcccagtttcacgacgagacgctcagcccgtcttgtgacggtccgcgcgatatgaagctgagcagccgccttatgcccgcccggaagaataaatttctcaagcgggggcgcttcagccgtgtaacggtctatgcagtcttccaatgcggaaatagatgtctctcttaatgtatagcttctatgttcagtgaccgtcgccaagtcgccgccgcagtcaaacagctcatgctgaatgtttcggagttcggctttcacatcaccgcaattctcacaattatctagctccgcaagcgcaagcccgataaagctgttcagctcatcgatcgtcccgtagctttcaacccgcagactgtctttatccgttctgccgccgatcaggcttgtctgtcctttatcgccggttttcgtataaagcttcattgttgtattcctccttcttccgccgcttttacacataccgcggttcctcttctgacggctctttccgcgtgagggacgtccattgcctctcctgtctgcaaggcacaaatggcaatgtcgccttttgccagtctgccggaaagagcctgcattctcgcttcagccgctgccgttaacagccgaacaaatccctgttccgataaacgtccgctgatcagcacccaaacggtatactgcgcagtcacggctatcgtaaccgaatcaaacgtacggcagatcaaaccagctgccgccgagccggaaagccggcggctccacgaaaagcccgggccgtcagatgcggttgacagcattctaaacggccgttctgtatgaagcgttacggtatttccgcttttgtttatcagagaggcgaacggaacgccggcgggctctctttcctcccgcgcttccggcatgaaagcgatcagcggtttcggcgacgattgccgggcaacagcgctgacggtaatgccgtaaatgtcttcaatcgtctcttttttcaaagcctgatccggtggctgcttcggaaaagcgcgtccgtctttcatcatcaggagctgatcacaatattggcttgcgacgttgaggtcgtgaaaaatactgatgaccgtcaggcctctttctctcgtcagccgcttcaccgtatcaagcaggtctttttgatatttgagatcaagaaaggtcgtcggctcatccagacacagcacctcaggctgctgagccagcgcctgcgccagatagacgcgctgccgctcccctccgctcagattgcggacggattgctgtgcatatcggtcgatgcccgtcatttccattgcttcccggacaatgtcttcgtcatgttgatccatctgtctgaagagtcctttttgatacgggtatctgccgaaggacaccgtttccttaacggtaaatgtaaaagcttgctccgtatgctgcggcaaaacggccataattttcgcaagctcccgcggcttgtatctgcccgcgggcctgcctgcgacgagcacctcgccctttgacggagagagcattcccgtcagcaatttcatcagcgttgtttttcccgagccgttcggaccgagtatgccgacaaattcaccttttccggcggtaaaactgacatcttctacaatcatccggcctccgtacccgccggacaggctgctcaccctgatcataagcgtttccctccatgatgctggcgaagcagaatcaaggcaaacacaggcgctcccgccaaagccgtcataatgccgatcggcaattcgacaggctcaataacggtgcgggaaaacaaatccgccaaaatgagaaacccggcgcccgtcaatgctgacagcggcagtaaatggcgatgatccgtcccccacaaaagccgtgtcacgtggggaatgacaaggccgacaaacccgatcgtccccgagacggcaaccgctcctcccgtcaacagagatccggcggcgatcatcagcagttttctttttcccgtactgacgcctaacagctttgccttttcttctccataagtcataatgtttaattctctgccattgataagcagaagcgccgtcccggccagaaaaaaaggcagaaacagcgcgacatagccccagcccctcattgacacgcttcccaacagccagcggacaatcgggagcagatcatttcccgttaaagcaatcacaagcgaaatgagagccccgagaaaagaattcataatgatgcctgtcaaaatgagcgtcgaaaccgacatcgacgcatgaacgaggcggctgaaaaacagaaccgccgccataaccgcaatggcagcggcgatgctgacaaccggaagtgtgaaccggccgatgacgggaatctgaatgccgaaaaacaaggtgataacggctcccgccgaggctcccgaagataccccgagtgtataagggtcggcgagcggatttttcagaagtccctgaaacgccgcccccgcaatggatagcgcggctccgacaagagcggccagaacgactctcggcaggcggatattgatcataatatttacattcatgggatcaacagaggatgtccggccgatcccgatccaaaaaacgtcggataaaggaatatgcagactgccgattgaaatgccgagtgccgtacaaacggctaaaaacagcaggctgaccgtgtaggccagcgggcggttactttttaaacgtttcaggataaacgctttctgcaagcttctcgacccctttgacaaggcgcgggcctgagcgtgtgacaaggtcaggatcaacagaatagacattgtggtgtttgaccgcattgacggcaccccagccggcgcgtttttccacttcagcggcctttacgccgtctgtcgtgatgataacgtccggattcattttgacaatcgcttcatccgtcagctgcacccagccggtctggctgccggcggcgtttttcgcatgtatatcttcaagcatttcgttcataaacgtgtctttccccgtcgtgtagccgtcaggagacacttcgacgaatactttcttttcgtctttttcagaaatggccgccgctttcttttctatgccggaaaggtcggatttcatcgattggatcagctgatccgcctgcttttctttgccggccgcttttccgatcatgctgattgatttgtacacatcttggaacgattgcgcatcattgaccgttaagacggtgatgcccgcatctttcagctgcttcatcgcatcggcggaagcggacatagaggacgcgtgggcaagcacgagatccggcttcagcgcgatgactttttcagcgttcacattcatatctccgactttcggtttttttacggcttctttcggatatgtatcatttgtcgtgacgcctgcgaccttatctcccagtccgagcgcgtatgtaatttccgtattgctcggcatgagggaaacgattttttccggtgcctgctttatggttactttttcgttcgcggcatccttaatggttaccgggaatgcttcggttgagacggctttttgtttggccgcgcttccttcttcctgtgcgccggaacagccggcgatcacaaaggcggtgaccaagagcgccgcccagacggcagtgatcttcttcattcttttaactccccctgattatggtaaacgattgtctctttgacattcgtatccttttttcgcagtaattatactataagtctttaaggcttgtatatccggcctttttgcatgaaagcaaattgttcgtacacactaaaattcatcatgtatactgttacacaatggtgtaataaggaggattatcatggaattacagcttgaacgaaagctcgtattgattacaggatcaacttcagggatcggaaaagccgcggcaaaaagctttttagccgaaggcgccgaggtgattgtaaacggaagaaaaaaagaaaccgtggaacggacggttgaggagctttccgcttacggaacggttcacggcatcgctgcggatttatcgcgtcaggatgaggcggatgacctgatcaagcgcgccggcggaatcggggaagtcgatattctcgtcaataatctcggtttttttgaagtaaaggacttcgctgaggtgtctgatgacgaatggactcggtattttgaagtgaatgttatgagcgccgtgcgcctgtgccggcgttttctgccgcaaatgcttgaaagaaacagcggacggattttgaacatctccagtgaagccggagtcaaaccgcttgcgcaaatgattccgtattcaatgacgaaaacggcgttaatcagcttgtcccggggaatggcggaaatgacgaaaggcacgaatgtcacggtcaactccgtgctgccgggaccgacatggaccgaaggcgtcgcttcttacatggaaggagccgcaaaggctgccggagaagacacggacagcttcgtccgggattattttaaagtgaatgaaccgacatctttgattcagcgctatgcaaccccggaagaagtcgccaatacgattgtatttctcgcttcatcagctgcttctgccattaacggcaccgcacagcgggttgaaggcggcatcatccgctccatttaacacaaaaaagcccggcacaaggggaacttccccatatgccagggcttttttttacatcatgcctgcaaacggaaccggctcccagccgcccgtctcaagctctgctgaaaacaggccgcccgcatgcggctgctcaagtctttcggcttccgtcaatttttccgtcgcggtcgtaatgtataacgtgttcaaattgctgcctccgaacgcgcagcaggtgacgtatttcgccggaacttcgatagatgcaatttccttatgcaaaaacgggtcaatccggacggcgcggccgcctccgaacagagccacccacagcattccgtcacggtcaatggtcattccgtcgggagatccttgcgactccggaaagcggtagaccgttttcggatctgatacggctccggtttcaggatcatatgcataacagacgatttcctgcgtcggagtatcaatatagtacatcaggtttcggtcccgatcccaatccaaaccgttcgaggtggagacctggtcttttattttggcaaggctgccgtccgtattcagacggtacagcgaagcctcctcttctttgccttccatgctcgtcgttcccgcccataatctgccggacgggtcgcattttgcgtcattgaaacggatatcttcccgcatgtctttcggctgcttcatcttcgtcaatgtgtcttcccgcagattgtacaggtaaaacccgtctttcatcgtcatcaccagctcttcctttgaatacaaggccagagccgtgacaaatgagttgaatttaacggaacggttgattccgtcagccggagtgaagatatggagctggctgcccagtatatccacccagtacaggcattccttatccttgtcccataaagggccttctccgataactgctctcgtatctgctcgtaatgctgcttccatgtgtgaacacctcttttgcttgtcagtcttctattgttattcccgacaaagcggcgtccaaactcaatcttttttaaaaagaatcgtaatcaccgttccggcgctgattctgctgttgacatggatggttccgttatgaaggtgaaccagctctttggcaatggcgagcccgagtcccgttccttctgacggccccttcgtattcgttccccggtaataacggttaaacagctggtgaatcgtttcatcgtccattcctcttccgttatctttcaccttcagaatgagctgttcggctgattcctcaagcaccacccgaatggcggtccccttcttattatgcttaaccgcgtttgccagcagattctccagaatacggcggaaccacgcttcatcaatggcgaaaagaatgtcttcctttttggtttcaaaggcgatgtcatagccttccgagaacgtgtttttcgtaaaatcgttcgtgacgtttctgataaacggcacgacgttgatcagccgccgttcgatcgggagggccgcgtttttgaggcggtatgttaagtttaagtcctcaatcagcttagacatatattctgatttttcccggacgatctgccccatttctttgacttcttccggtgtccagtcgtattgcttcgattcaagcatcatgctgtagccgtaaatcgtgctcagcggggtttttaagtcatggctcagcccggcgatccattcttcccttgtcgcctggattttttctctgtttttcttatcccgcttcagcgtgtcggtcagctgatccatcgattcgaaaatctcggcgaaaaagcggaacggctgttttgttttgccttttttgtttttgctgaccggctgtcctttgcggttcttcggctcttcaagccggccctttgataaattgacaagccatttgatggtatgaaacagcggccagccgaaacggaaagagtaccagatggtcaggatgcagatcataaatactaagattccgatcaagaggaagagggttttcatcacatttctcaaaaatgatttgttaaactcgtgatcggggatgtacacggggttcggcaccgacgcgaccatccatttcgttttatcgagtcttttaaaagaaatttcccgtttgtaattccacggcttggaactgtatttcagcaattcaagctcattgacggtgttccgttcttttttcgtgctgttgatatccccgagcagtctgccgctgttttcgagaaggtagaccgcccctttttcccgtttaatataatcaaccgtgctttttttatattgagaaagggaagcgagggatggctcctgtgattcgatgtaagtgagaagctgctcactggcggatttccagccgaacagaatcaaataggtctcatcatttatcgtgaccgtccagtaattcagcttgtagttgtcaaaattccggtactggtaaatggataagaggtcttttctgctgtaatggctcgggacgtctttcggcactctgtatgcgtagtccgttttttctttgtcattaatgatctgcagccagcccttctgctttctgaccgacatctttaaaaattcatcgacatcccatgtgccgtcttcgtttttatcaagccacgcttcaaacgagtctgccgtcgctttggtcagtcccgcattggcttccgcttcgctgaaacgccaatccaaatagaagaaagaagcgacggccaaaacggacatcagcaggatgacaagcagaagctgtccgaaaaagtggagcagaaattttccgcgcattctcatgagcggattcctttttctccttgatcgggaataaaccgatagccgaggccgcgcaccgttacaatataagacggattgctggggtctttttcaatcttttctctgagcttgcggatatgcaccatgacggtgttgttatcgccgtaagacggatatccccacactttttcatagatctgatcttttgagagcaccacatcagggtgttcacagaaatattgaagcaattgcagaagctgtgcggagcagctgacgggctcgcccccgacgatcagctcggcgttttgcggcgaataggaaaaatggctgtatgaatacgtttttaccgccgttttctcttcgcgcttataggttctttttaacgtcgctctgatccgcgccgccaattcgagcggattaaacggctttgttatataatcgtcagctcccaatgcaaatcctgacagcttatccgcatcagaagaacgggcagtcagaaaaaagatcggagcgtcggtataattccggatttcggtgcatgcttcaaaaccggacatgccttccatcatcacatccagcacgagcagatccgcggtttcatgtttaacaaactcaatcgcttcctcagcgcttccggctgtcttaatgttgtgatagccttctttgacgagaacgcgtttgaccatatcaacgatcgccttctcatcgtctacaattaaaattgacgcattttccaccttggacgttcctttctctttgtttttttcatcatatcattatatggataagatttggtacctttttagtgcggaggtcttgcggggaaacagaaaagaaaaacgagacggacatctcttctcgtttttctcacgttgtcagagcggaatatccatcattccgccgcttttgtcaggagctttcatttataagatgaagaataaattcccaaaaacccggcacttcctggcataacagcatgtccgctttttcaactattttaatcttcaattcttgttcaaggtcttctctttcctggtatgatgtattgctcagtttttttttatcattggcgaaaaacgtgaaatcaaaagttccatttcgtcggtatctgtgttctctttgttgaagtcaaatggcccgttcactgcttattttccccctttttttgcttgtccagctgctttctgagattgtcgagcccttttttatgaatattggaaatgttctgccgtgattcacccagcgactcggcaatctctttcatcgtcgctccgtgaagataaatattcgtcagcacgcttttttgtttatcggttaacgtctgaagcgcttcgtataaatcacggttttggacatgctggctcaaatctccctgcttccgcagaaactcttcatacgcgtcttttcccatttcatagggaagcgcttcacctccctccggctgatccaccgtcagcggatagcgattctgatttttacggatgcgcttgtcaaaatcgatggagaaaatccggatcatagagttcatatatttgatgatccggatttccttataaaactgtttaaaatggtcgtccaatgattttgcatccttctcgtctgaatgttccagcacatttttaaatttctcgtaatgctttgggtcacttaaaaaatgtttaacgatcggatgtttcataatttccttgcattttgaccgtaaaagaacttgatagtccataaaaccgccccctatttaaattaaatgaaagaaagcaaaaaaaagtaaactactcctttccgactaagattccgcattccttatgtcccggatttgccggaacaaaaaaaaagaccctcaaccgggatatcaggtttacaggagccgctctttctttcacttatatacatgactgcaggtcaagtcaggaggtggctgacaatggatcaggtttttatagaagaagcggtcagacagatcggcaatctcggctttccggctctgattgctatgtatcttctcacacggtttgagaagaagtttgacgccctgatcgaactgatgacggaactgaaagatcagaaaatgaaaaattaattttcacacgaagttgacttttcatcggaacgcatcacttaacaaagcagaagggaaaacgaaaggcctttcacattctctttctgaaaaaacaaagcttgagaggagacgatttacatgtcaaaagaaaacaactgcaatatcccgcagccgatcagaggagacaaaggagcgaccgtcacgattccgcgcaatcttgaaagagaccgccaaaatccggatatgctgacgccgccggaaacggatcacggcacagtggataatatgaaattctctttctcagatgtgcataaccggctggaaaagggcgggtacgcgcgtgaggtgaccgttcgcgagctgccgatttctgaaaatctggcatctgtcaacatgcgtttaaaaccgggcgccatccgtgaactgcactggcataaagaagccgaatgggcatatatgctgacgggcaaagcgcgggtcacgatcgttgatgaacagggacgcagttttatcgatgacgtgaaggaaggagatctgtggtacttcccgtcaggcctgccgcactccattcaggcgctgaaagaaggctgtgaattcctcttggtttttgatgacggttccttctcagaaaacagcacattccaagtgactgactggcttgcccacacgccgcttgatgtcatcgccaacaatttcggggtttcagaaaaagacctcgccggcctgcctcggaaagaaaaatacatctttgaagagccggttcccgggaagctgaaagacgacattgtggaaggcccgaacggcgaagtgccttatccgttcacttaccgcctgctcgatgaaggtccgactgctgagacggaaggcggcaaagtatatatcgcggattccacaaacttcaaagtgtccaaaacgatcgcttcagcgcttgtcgtggtcgaaccgggcgcaatgagagagctgcactggcatccgaatacgcatgaatggcagtattatatttccggtaaaggacggatgacggtttttgcatcggacggccatgcaagaacatttaactatcaggccggggatgtcggttacgtcccgttcgcaatgggccactatgtggagaatttgggggatgagccgctcgtcttcctggaaatcttcaaggatgaccactatgccgatgtgtccctgaaccaatggcttgccatgcttcctgagaaattcgtccagcagcatctggatctgggcaaagactttacggatattctttcgaaagagaaacaccctgtcgtcaaaaagaaatgctgaagatacacacccgacttgcagagttccgtctctgcaagtctcctctgtgtgaaaaggagctgaacagatgatcaatcaaaacgggacgaaaatgttttttcttcaggtgctccggtatgccctggcagccgctgccgtattattcgggtatttcatcgtgatgatggccgtattttcattagccgggacgagctacggatcgatggcgtacgtcctgcttttttccgtgctttttattcttctcggtttatgttttgaaccgcttgaacggctgatgatacatagctttaccttttttgggacgggcaggctgccttttctccttttagccggcaccgttcagctgctgttcctctggatgactgcgtatacgacggataaactgattgaaaagatttggctgtcaacgacggaggagctgattgtggcgggggtttttttcgttttggataaatgcgtctccggacaaaagcagccccgggcgcactaaaaaaacgcaggccggaatggctctgcgttttttttcatcttacagttgcgttttcatgccggattaaatcgtaggttaagcagaccggtttgttcgtgcgcggatcttttacaatctgtgcgtcaatttgaaacacgtcttccaatataccgggagtcatgacttcctccgccgttccttccttgatgacgcgcccttttttcagcgcgatcatgtaatgggaaaaacgggcggcatggttcagatcatgaatgaccattaaaatggtgcggccctgctccttgtttaatttgtccagcagctgcaaaatttcaagctgatgggcgagatctaaataagtggtcggttcatcaagaagcagcagctccgtttcttgagcgagcgccatggcgatccacacacgctgccgctgccccccggaaagcgcttcgatcggccggtcgtaaaattcggccatccccgtctcttcaagcgcccatttgatcatgtcacggtctttatcactcaagcggcccattccggactgatgcggaaacctgccgtaagaaacaagttcgtacaccgtcagcccgctcggcgcttcaggcgtctgcggaagaattgccatttccttggcgatgtccttcgtggatttttgcatgatcgcctgtccgtttaaatagacggcgccggatttcggtttcatgattcttgacatcgttttgagaaccgtcgattttccgcagccgttcggaccgatcagcgttgtaatttttcctttcgggatggcgatatccaattctttcgctatcaaacggtcgccataaccgacagtaagctgttccgccgataatgagttcatcgcggcagtctccttcctctatttcgttttcatcagcaaatatacaaaatacggcgctccgagcacggaaatcaccaggccgacgggaacttcggacggtgcaagcacatttctcgccagcgtatcggcaagcagaaataaaaatgctccgatcaaagctgaaaccgggataagcgtctggtggcgcggcccggtaagccttctggccaaatgcggcgcaatgagtccgagaaaagcgattccgccggctgccgcaacacatgacgcggtcagggcaacggcggacatcagcagaacgcgccgctccttttcaaccttggtgccaagccccgccgccagctgatcaccgagctggagcacatttaaatacctggctttatagaggctgaacggtaaaagaaccagcagccacggcaaaatggacagcaccattttccaattggcgttccaaatcgaaccggaaatccatacaagcgcctgcatgaaatcccgcgggtccattttcagctgaaaaatcaagagaagcgcattaaaccccgcattgacaccgatcccgaccaaaacgagccggacaggtgaaacgccttttttccaagccagcacatagatgagcagcgcagccagaaaagcccccgccaaagcgctcaccggaagcagccatgtactggccatgcttagatcaacagctgacccttggaaaaagaagataaacagaacgaccgccaaagacgccccggcgttaataccgagaatgcccggctccgccaagtcattttgagacacgctttgaaaaatcgcgcctgaaaccgcgattcctgcgccgacaagcaatgacagcaccatgcgcggcagtctgaattcaaataaaacgagctgatcccgggcatccccctgtccgaaaaagacacgcatcgtatcaagtggcgcaatccggatcacacccatgtttaagctgataaaaaagacgatgcatatgagcacaaacgtaacggccatgaccgccagcggttttttcgattttacattcattacagccctctcctttccctgcgcgccaaataaaagaaaaagggaacgccgataagggcggttaaagcgccgaccggtgtttcaaacggcgcattgacgagtcttgcggcaatatcactgaagactaacagaacggcgccgaataccgccgaacagggaatgatccacctgtaatctaccccgactaaaaatcgggtgatatgcggaatcaccaagccgataaaagaaatggctccggcgactgagactgaagcccccgtcaagaggacaacgacaaacattccgattactttcacaagcgatgtgtactgcccgagccctttggccagttcctcacccaagctcagcaccgtcactgagcgcgcaatcagaaatgccagcaatagtccgataaccccgaccgccaaaagcagctgcatgccttcccatttgacggaagcgactcctccggcataccagaacttcacatcctgggcgacatcaaaacggatcgcaatcgcgcttgaaagccccgttaagaaatagccgactgccgtaccggccagcgcgagcttcaccggtgtcagaccgccttttgaagacaggccgatgccaaacacaataagcgctccgattcccgctcccgtaaaggaccacaaaacaagtcccgccgcagacagacccggaaaaaaagcaaatgccaatgcgatcgcaaatcctgaccccgacgtcacgcccataatggaaggctcagcaagcgggttccgcgtcagcccctgcataatcgctccggacacagctaaaaaagccccgacgagcgcggcggcggcggttctcggcagcctcagatcgcgtatgatttgatgagatgtattttgcggctgaaagtgaaagagagcatcccacaccgtccgcagatgaatatcggcagctccgatggaaacagacagagcggcgccgatcaataaaaccgcaataccggcacacagcagcacagcagcccggaatgaacgcgccgtccactggatttcactccctgatgccccttgagccgtcattgtctgtttctttttcaatagacccaacactcgttcttcctttctcaaaacaagaatggtaatgataatgattatcaatgacttgtttcagtatagcacttttatcttctcttttaatagacctaatttcatataaaaaaagaaagtttttctttaaaaagagcgtgcttctctatgaaagcagtgatataatcacactgataatgattctctttatcactaatttttatgaaagaaggaatgtcagatgttccatacatacaagaaaatcggcgcagcgctgattgccgtgctgctcttcgccgctttggccgcatgcggcaattcttcagacacaaaaggttcttctgaaaaagaagaaaccatcacgtataaagccgaaaacggcaatattaaaattccgaagcacccgaaacgggtcgtcgtcatggctgacggctactacggcgactttaaacagctcggcatcaatgttgtcggcgcgccgcaaaacgtatttaaaaacccttattacaaagggaaaacaaaaggtgtcacaaacatcggcgacggcacgtccgttgaaaaaatcattgacttaaagccggatttaatcgttgtctggacgacacaaggcgccgatattgaaaaactggaaaaaatcgcgccgaccatcgccattaaatatgacaagctcagcaacattgatcaattcaaagagtttgcgaaaatgacaggcactgaagataaagcagacaaatggctggctgaatgggataagaaaaccgctgccgctaaaacaaaggttcaaaaagcggtcggctcaaaaaccatctccatcatgcagacaaacggaaaagacatctatgtattcggtaaagacttcggccgcggcggaagcatcatttatgacaaactcgggctgaaggccacaaaactgacgcaggaaaaagccattaatcaagggccgggctacgccagcatttcactcgagaaactgcctgacttcgcgggagactacatctttatggggccatggcaggccggcggtgacgacaaaggcgtgcttgacagctcaatctggaagaacctcgatgccgtcaaacaaaaccatgtctaccgcattgatccgatcggcttctatttctcagacccgatctcacttgaaggccagctcgactacatcacaaaaagcttaacgaagtaaccccgaagccgctgtcacagcggctttttattacgcttaaaacttgacaaaaaaatttatttatgttataatttacatttttggattaacatgtataataagattctcccggccggagattgatgtaaataacggaggatctttatatgaaagaaaacaaggcgagtatgacttccctgctgtccgctttcggaagggcgtaccacagtaaatacgacaccccggtgatatttgatgattttatggcacaagatctgatttccgaaaaagagcattcggacatccgcgatcatctgattcaaggtatatcatttttcagtaaagacatggcacagaggcttcaaggccaaccggatgacatcttaaaatgggtgactcaagtacagctgtctcctacaccgttagcccgtgccgcatattgtgaagaagtgcttttgaatgaagtgaagctcggggccaaacagtatgttatccttggcgcggggctcgatactttctgtttcaggcatcctgagatgacaaacgtcttagacatatttgaaattgatcatcccgcttcacaggaagacaaaataaacagattgaaacatctgaatctcgacatttcccatcatcttcattttgtaccgatggacttcgccgcttcgctttctttcagccgtctgtatcaggaaggtttttcacgccaaaaaacctttttcagcctgctcggtgtgtcatactaccttacgaaagagcatctcgcccgcctgctcacacaattatttgccgaagtcccgccgggaagctctatcgtgtttgattatgcagatgagtcgctctttgaagaaagaggactgtcaaacagagtggaaaacatggtgaaaatggctgcagcaggcggagaaccgatgttatcgtgtttcagttataaagaaatcgaaaaaatattagaatcatcaggtctgcttatttatgaacatgtatctccggcggacgtcaatgaccgttttttcagcggacgcactgaccatttaaccgcatttgagaccattcattatatacacgccgtcaaaaagtaatccgctgttgcaaacaaaaaaagacatctcacagacgtgagatgtctttttgtcataccgatggtctgttgtttgcaaatttctttgagacgaaaggatataacagcaaaccgacgaaaaacagcccgataccgagaataaaggtcgttaaatcggccgttccggtaataatgacgtaaaaagaataaatgcaggcaaggatggcgatgataccgtctcttactcttgaaccctttatctcgtcatacgtttcacccgtaaaaatgagcttcaggctgtaaaacgctgacacgagatacggaatcagataagcgagcgtcgccgccgtcgttaaaaacgtaaacgcgtcactgatcgtccgggaaataaccgaaaagataaagatctgtgacattacgttcgttacgattaacgacacaaccgggcttccctgtttattcgtttttgcaaaagcagcgggaaagtctcctgatttcgccgcttgatacggaacttcagaaccgagaagaatccagccgagcatcgttccgaacagacacaaaattgccagaatcgccatgatgacgcttcccgcgctgccgacgatcgcgtacaatacgtcaacaaacggtttttccgagccgacaagcttaccatgcggaagcacgcccatcgtaatcaatgtcacgatgatatagatgccaagcgcgatcaataatccggtaatggtggcgcgtttcacgtcgcgctgcgaacgggcgcgcccggataaaatgactgccgattcaattccgacgaacgcccataatgttgaaatcgccgcattgtggatctgtccgccgattccctcaaccgtgtgaggacctgtttgaacaggaaaataaaaatgatcgaaaaacgacgtttgaaatacaaacaaacctgcaatgataaagaagataaatcctaatacttttgaaaacgtcgtgacgaaatttaatttactcgcaccgttaatgctggtgacgaggatcgtgtgagtgccccataataaaaccgtacatacggcaaacgtcagcagctggccgagcgtaaccgcctgaccgccgatcgaaaacatttcacgcttatccgttaaaatcgggaaaaatgatgttaaatatccggcaaggctcgtgatgatcgccacgttgctgatccagctcgccacccagtagccccacaccatcgtgaagcccgcagcattcccttttttccgatcgctgaacagcgcacgcgcatagctttgcggccccgccgtcagctcaggcttgcggatggataagtggccgaagaccagcgcgatcattaacacaccggctcccgttaaaagccatgccgatgtggcgccgaacgggctcgcgatttttgcgagcgtactcgggagcgaaaagatgcccgagcctaccatatttcctacgacaaacgccgttaataaccaaaaaccccattttttcgtctgttccattcctgtacctcctggttgttcattcgtacggaccagaccccgagaccatatttacacgcaaaaaaagcctgaacaaaagtccatgcttaaagaaacacacacacccttgatctccggatagccctccgcgaaaaagcacgcggcagtcctgcacttattcagatacagtcccagcataaagaaggatcggctttctttacacttcggcgctgatgcctttaacacatgttttgcggccccttatcagcctggcatgtgcgactcatcatcaagcgcaacctctacctcaccgagaaagagtgaggatttttatcattcaattctactcagaggttatcagagataaaaagatctgtcaaagggaaatattagatggaaaacggatagagcgttcgccctacccgtcttatatggtcagcggttgtttttttcttttgaacagcttcttgaagcggatcgtctttcagagctgcactggcgtcgtcaagcgcgccttgaatgacgtttttgtttttatcgctgttttttcctttttctttgttaaagaaagccatctgtatcacctctttatcaaatataggtacacctataatgtgtctttttccgcggcagaatatgcggaatccgcgtctccttccttttggcggaacaggtaaagtttgttgatcaaacatgcattctcttgatatatttgtaattcaggggattttggcaaaaataaaaaggagaagcgaaaaatgacaggaaaaacacacatcatgggaggcatcgcttcttgttccgcaattgcgtattattacgggtatgatccggtccttatgacctcagcgggtgccctcggggcgctgattcccgacatatgccatacgaaaagcaaaatcggcaggacgctgcccgttctgtccaaagtcgtaagcacggtgttcgggcacagaacgtttacacacagcctgctgtttatgcttattatgtttttcattacggcaacctatattccgaatccgagcatttccgccggactgatgatcggaatggcaagccatcttgtacttgacgcatggaccgtcaacggcattaaactgctgtttccgtccgccatccgcttccgtcttcccctttatatgagaacggggagcttttcggagcagcttgtgctggccggcttaacgattgtatcctgctattatttatacgaactggttcacggccgcatctcttaaacaaaaagcgtcttttcgcttttagggtgaggagtcatacatatgaagaaaacctttttcagcaatcatcggtttttatgcctgtccatcctgttcatgtggatgaaaacctatgccgtgtataagctcggtttcggtctgcagaacaattcggttcttgaggaatgtctgctccttattaatccgctgagcttcattgtgccgctgttcggcatcgccctcttgctgacggaaaaaaaacagcggatctttctgctttcggcaaatgtgatgctgacgggaattttaatcgcgaatacggtgttttacgggttttatattgattttatcaccataccggttttgtttcaggcaagcaatatgggtgatatgggaagcagcgtccaagagctgtttcacccgctttatatcgctttatttttggatattgcgattttgttttatcttggaaaaaggcataaagccgataaaggaaaagcgggcgcccgtaccgttaaagcgtatgcgtgggcatcagccggcctcatgctgtgcaaccttgcgctgtctgaggccgagcagccgaagctgttcaagcacccttttgatcgtgaagcgctcgtaaaaggaatcggcctgttccactttcatttgtatgacaccatttcgcagacgctgaatgcaggggctaaagcgtttgccgatgaagacagccttgcggcggtcgcgaattacactcaagccggctacagcaggccgtccgattcaaaattcgggcttgcaaaggggcgcaatgtgatctttgttacgctcgaatcaacacagcgttttgtaatggatgagcgggtcagcggacgggagattaccccgtttttaaacaaactgcgaaaaaaaagttatgacttcactcatttttatcagcagactgaacagggaaaaacatcagattcagaattcattactgcgaattcgctgtatccgtcttcaagcggcgccgtttttttcacaaaaagcggccaccggttcaatacgatgtaccatatgttaaaagaccgtcaatactattcagccgttctgcatgccaatcataaagccttttggaaccgggatgagatgtacggggcattcggaatcgaccgttttttcgacgcggatgaatttaaggtgacacaggaaaattcaacaggctggggcctgaaggataaggagtttctcgaacagtcagcggaaaaattaaagaagcttccgcagccgttttacgcaagcctgctgactttgaccaaccatttcccttttgaaattgatcaacaggatcagctcattgaggaaccggacacaagcagcgagttattaaaccgctatgtgacgacggtccgctatgaagatgaggctctgaaacactttttcaagaagctgaaaaaagaagggctgtatgacaacgcgatgatcgtcctgatgggagatcattacggtatatccgaagcccataatcaaggacttgccgaattcttagggaaagaggaaatcactccgtttgatacggttcagcttcagcgcgtgccgtttatcattcatattcccggggtgaccgaccgtgcgccggaaacgattgcttcggccgcgggacaggttgatgtaaggccgacgctgcttcacctgctcggcattgaaacgaaaggcagcattcagttcggcaatgatctgttttccggagagcggactccgtttgcggtgctgagaaacggcagctttatcacggatgaccatatttatacgaaaaatacgtgttacagccgtaaaacgggtgaaccgctttctgacatgagcgcgtgcagcgatgagaaagaaaaagcggaacaagagctgatgctttccgataaaatattaaacggcgacctgctgcggttttataagcaataaaaaaatccctccgttatatggagggatttttcatgtttcatatatgagccgtcctgtcattttcgtatcatatccggataattgagaaagctgagacttgaattcctcagaattaagaatgtcccgcacgctttgaacaagctcccggttttgttttaagacgaccacatcgtactgctcactgatcaccgggataaagtccgtgcctgccatatgcgccgcatgcagcgacccgactccgatatccgcctttccgcttgatacttgtgaagccgctgacagatgatccgtgacaatgtcatgatatccggcgacatcagacggcgtgatgccgaatgatctgagctgttcatccagcagcaccctcgcgcctgatcctttttcgcgattgacgatgcggacatcctttcggctcatgtcctgaaagccctgaatgttcagcggattgccctttttcacatataatccggcctgccgcagcacgacatgaaaaagcgcaaacggctcccctgaaagaatgcgcttcacatacgggatgttatactgccccgtctccccatcgtataaatgcagactgacgatgtcacaagccccgcggtacatctcgatcaggctgttcaaactgccgctgtacttgcggagcggagccgcctgtattgtttgttccagctgtttgctgaggaggtccatcgacacatcctgcccgctgatgataacagactgccttttttccggctcccgcccgcgtgacgggtcaggcgcttctgctgcggatggcttttttgacattctcatgtttgctttatattgttttaagtcctcttcatcgaccctcatctgtcttccgaccctgtacgccggaatgagtcctttttttatcaaatcatatactgtcagtttggagaccttcaaaaggcccgcaacttcttctattgtataggaagtggcttctgtcatattatcacgctccgtttttattataactgttcagatattgaaaaaaaaccgcaccatcacgtacaattgcgttataattagtttgatctaatgatatttagctataaggggtgcacaatgttgaaaaagaaagcgacactactcacaactgcggctatggccgttttcctcgcaactgcgggctgctcatccggacaatcgtccaaaggcggacaaaacgaaaacgtcacgctgaccgtttctgcagcagccagcgctcaggatgcacttgaagaaatccagaccaactacgaaaaatcacattcaaacgtaaccattcaagacaacttcggatcatcaggcacattgcaaaaacaaatttcacaaggcgcgggagctgatttattcttctcggcagccgaagataaattcgaaaagctcgttcatgacggagatatcgacaaaaaggacagcacggatcttttgaaaaatgatctcgtcatgatcgtgcctgagaaaaacagcgcacacctgacacatctgaatgacctgaaaaaagacagcacggaaaaaatcgcgctcggcacgcctgaatccgttccggccggacaatacgccaaacagtcactgacggcattatccctgtgggacaaggtaaaagataaagccgtctatgcaaaagacgtccgccaggtgctttcttatgttgaaaccggaaatgtcgatgccgggcttgtctataaaacagacgcgctgatttcgaaaaaggtgaaaatcaccgatgaagcaccggcgaaaacgcacgatccgatcgtgtatcctgtcggcatcgtcaaggatacaaagcaccgtaaagaagcagaagcgttttatcagtatctgcagtcagatgaagcgatgaaagtgtttaagaaatatggatttactgccaagtaacattacggcttcggagtttttcactcccgtcgtactgtcatttgaggtggctttggcgtcgggcatcgccgtcatcattctcggaacgcttgccggcgcctggatggcgaaagcgcgatttcccggaaaaacggctgtggagaccctgtttatgctcccgctcgttcttccgcctaccgttgtcggcttcattctcattatcattttcgggaaacacagctttatcggccgggcgattgagcggatttttcaccagcccgtcattttcacgtggtcggccgcggtgatcgcttcggccattgtcgccttcccgcttatgtatcagtccgctaaaaccggcttcgccgcggttgatgctgacatcgagggagcggcgaaagtagacggagccggcaggtggcaggtgttcacccgtatttccgtcccgcttgcctttccctccctcttgaccggaagcattctcagtattgcaagggcgctaggtgaattcggggcgactttaatgtttgcgggaaatattcccggcgtcacccaaacgctgccgacggcgatttacgtcgcgatggactccggcaatgaaacactcgcctgggtgtgggtgatctgtattgtgatcatttcttttctgatgctgtttttcatccaattgaaaaagcccgcttgaccgatctgccttccgcgcacctttcgccgggaggctttttgatttaaaatcggatggtatataatgaaacaaaaacacacaaagggtgcggctatgaagattaatgtcattatcgcggatgataattctttcatcagagaaggaatgaaaatcattttgcatacatatgaggaatttactgtatcagcaacgttggaaaacggactcgaggcggcagagtattgtaagcacaaccccgtcgatatcgccttgctggacgtccgcatgccggtgatgaacggcgtcgaagccgcaaaacggatcgctgaggaaacggatacgaagccgatgatcctgacgacatttgacgacgatgagtatattttagaagcaattaaaaacggcgcgaaaggatatttattaaaaaacaccgaaccggaacggatccgcgatgcgatcaaaagcgttttcaacgggcacagcattcttcaggacaccgtgctggacaaaataaaagacagccttttccggccggcggaagccgcgcatcagattgatgaaagccagtttactgaaagagagctcagcatcatgtcgcttattgcgaaaggattctcgaacagggaaatttcaaaacagcttttcatttctgaagggacgacggccaattatatttcatctattttagggaaaacggggcttgagcacagaacgcagatcgccattttttatatcaccgggaaggtggataacgggcgttgaacggtatggatttttggatgctgatgagcagactgatcgctattttttatacggcttttttgttcgtatcggtagaccgcccttacacgccgtacgccgtcttatttctgctgctttatctgtctttgggcatcgcggtctgcatgatcaggccgcccgcttggaggcgcgggatcaccctcatgacgctggcattgaccgcttggctttccgccttaggccatccggcgtttctgtttcttttgccgcccgccatttttgcggttcttgccgaatatccggttcaccgctatgtgttctgcctgctcgtgtttttgccgtttttatttatcccgtacggcgaccttccgacttatatcgtcataaccttgttctgtctggcgattttcgttttggccgcccggtccggcaatcggctgaagaaatatgaagaacagtcggacagcatgcgctcaagcattgaaaaactgacgaaacagctgcacagcagcacagaatatatcaaacaatcggagtacaccggcaaactcgaggaaagaaacagattgtcccaagccatccatgacaaaatcggccattcgatgaccggcgcgctcattcagatggaagcggcgaagcggatgctcggctcccatccggacaaagcggctgaactgctccaaaacgccattaccatttccaaagagggcatagaggatatccgcataacgctgaaaaatatgaaaccgcccgctgaacaaatgggcattcacagattaagaacgtttattgatgaattttcggccaaaaacgggatgccggttccgtttacgcatcaaggcgatttggacaggctgacgcaaatgcattggagagtcattcaggaaaacgtaaccgaagctttaaccaatgcgatgaaatacgccgatgccacgcagattttcattgatatccatgtgctgaataaagccgtgaaagcggaagtgaaagataacggaaacggcgccgtccgctttaaaaaaggcctcggcatgctcggtatggaagaacgggcggccgtcctgcacggaaccgttatttttgacggcacggccggtttttccgtcacgacattgcttccggttgaataagtgaatgttttcatgtgaaaaatatgaagattctcatgtcaaaggaatgaacagctgcactaacggccgttcattcttttttttataataagagcatcataagacatagaggtggaaacatgaacattttggagctcaaacagctgagtaagaaattcggtgattatgccgccgttgaccagatgtcgcttgccgtaaaagaaggtgagattttcgggtttctcggcgcaaacggagccggaaaaagcacgacgatcaatatgatctcaggtcttttaaaaccttcaggcggagacattctgtttctcggaaaagatattttcaaatatagcaaagcaacgaaaatgaatatcggcatcgtccctcaggacctcgcgatttacgaggaattaaacgcctatgaaaatgtgaagttcttcgcaggtctgtacggcctgagaggggcggctctgaaagaacgggtcgaggaagccctgacattcgtcggcttgagcgataaacacaaatatttgccgaagcatttttccgggggaatgaaacgccggcttaatatcgcctgcgcccttgcccaccggccgaaactgatcatcatggatgaaccgacggtcggcattgatccgcaatcaagaaattatattctgcaatcagtgaaaaagctcaatgaaatgggctgcacgatcatttacacgagccactacatggaggaagtggaagaaatatgcacacgcatcgccatcatcgaccacggaaaagtcatcgccgaaggcacaaaagaacagctgacctccatcattaccgacacgaaggacgtcgtgattgagctgtcatccggaaacggcatcagcctcggcgatattcaggagctgcccggcgtcagagccgccgcactggaagaaaacagcgtgaaaatcagctctgacacaggggtcaacaatttaaaccgcctgatccggtacttcatggacaaaggcattgaaatccgctccttgcaggaacaggcacctgacttagaaacggtatttctcacgctgacaggcagaagtctgcgcgactgaccctattgaaaggaggattgcaaatgaatattctgcacatcgccgggaaagaaatcaaaatcagtttccgcgacagacggacttttattttcatgcttgcttttccgatcgtcttcatgctgatttttaccgcggcattatcaaacgcctttgattcagaggtgacggtcgggaacatcaaggtcgtatatacggaccaatcaaacgggacactttctcattactttactgagtttatgaaaaacgccaaaaaagagcatgtctattttcaaaaagcggacacggaggcaaaaggcaaaaacgaggttcgtgaaaatcaggcggatgctttcgtcactgtaaaaaacaccggttttcaagtctatacaaatgaccggagcggcatcaacggcacgatcgtccaaggcatgctgaccgcttttaccaatcaatacaaagcaggcgccgccgcttacaaggcgcataagccaccttccgccggacaaatcaaaagcgattatatgaagcagacgtctttacacaaagcaaaagaaccgaaggcgaaagatttttacgcgatatccatgacgacgatgatcgggctgtacgcctcgatttttgcaagctccttattccgcggggaaagaatacggcacaccgcggatcgcctgatcgccgccccgctccggaaaagcgatatctttcttggaaagatgctcggcattttggctgtgaatgttctgacgattcttgccgttgtcgccttcagcaaatttatcttgaaagcgaactggggcagccacatgggacttgtgctgttgattctcgtttctgaaattcttttggccgtcagcttcgggctcagcctgagctatttgaccagaaaacccgaaagcgccagattaatcaccgtcatcatcgtgcaggtgatgtccattatcggcggcgcctattacaaatatgaaggagggggatttccgccctgtcgcccttatcctggatcaataaggcgattaacaacatcatttacgcaaatgatgtatcagcggcatggcctgcactcggtttaaatacagcattggcggcactctttttgctgatcgccgcatttacgtttcaaagacgggagggactgtaatatgaaaaacttctggtggctgtttgcacacactctcaaaggaattacaaaaagcaaaaaacagctcattctttatatcggggctccgctgatcggcgtcttcctctccttcatgaccaatgccaacggcggagccgaaacgctcaatatcggcattctcgatcaggacggcggagaagtggcacaggatacggtcacgtttttaaaaggactggatcatgtgaagatttcggaggaaacggatgcgtccgcctcatcaaagatcgcttcaggaaaaatggaggcgctcattacgtttgaaaaaggcttctcccaaagcgtaaaagacgggaaaccgtctcacatcggcatgacctcgctgaagggcgcccaggtcaccggatatgtcagctcttatttgtacaattatatgaacagcgccgcctcaatcggcaaatcttccggcggagacgagaaagcctttcaggcgatgtacgccgatttcaagcattctccgattcaaacggagtccgctgttttgaaagatacttcgaaccataaagaaatgacttactcagtcatcgggtatctcattatcattatgctctattccgccggcaacctgacggaactgatgattaaagagagagaaaacaggacgtactacaggcttctgtcaacgccgatcacgtcaaagcagtatgtattggcgaatgcggcagtgaatatcattatcatggccgtccaaattatattcgccgttctctttatgggcgccgcttttcatattcatccgtcattcccgctgtggcagctgttcgtcctgatgatgctgtttgcattaagcgcaatcgggatcgcctttattgccgtcggtttttccaacagcagctcttcggcatcggcgcttttgaacttgatcgttgtaccgacatgcttgctcgccggctgcttttttccgggcaatattatgccgaaaacagtgcagacaatcgccgaatttctgcctcagcgctgggtgcttgatacggtcgatcaattgcagcacggccgcacgctccaaagcctgacgctgaacatcatcattttgggagccttcgccgccgccctgttattaatagccgcatacaggttcagcgtaaaacgtcagacacagacatttatgtaaagaaaaacagccccgtaaagggctgttttttcttagaacagaagctcgtccggattcgggccgacacgctcgtctttgttcaatgcgctgatcttttccatttcttcctgtgacagttcgaaatcaaaaatatcggcattttctatgatgcggtgctctttaatcgatttcggaatggtaacgacttcgttctgaagatcccagcgcaaaatcacttgagcaaccgatttgttatgtttttccgcaatttgtgacagcacttcgttatcgaggagctgtccctgcatcaatggagaccacgcttccacttgaatgccctgcgctttgcagaaatctcttacttctttttgagtcaggcgcgggtggaattcaatctggttgaccatcggcttgatttcagcatctttcagcagttcttctaaatgatgcacttggaagttgctgacgccgatggcgcggattttgccgtccttgtacagcttttcaagagcgcgccatgtgtctttatatttatccttgcccggccagtgaatcaggtaaaggtcgaggtaatcgaggccgaggcgctcaaggcttttctcaaacgcgtcaagtgtcgtttcgtatccttgatcttcattccacacttttgacgtgatgaacagctcttctctggcaacgcccgcagctctgatgccttcgccgacaccctcttcatttttataaatagccgccgtatcaatgctgcggtagccgtttctgattgccgcttcgacggagtccgccgctacgcttccgttttccaccttgaagacgccaaggccgaaccacggcatttcaacgccattatgaagctttacagtatcttttaagctttttgccacgttgaaccatcctttctagtcattatgtaaacggttattattatctcacatttccgccgtaagaaaccaattatacgctcatcgttatcacaaaaaccatctttagtgcccaagcaccactgacgttattattttcctatttttcaaaaattacggttaatcaggtaactgtccgggtaaatcgctactgtagccaccacacaattgaaggaggaaatcatatgaaacgtatgcgtatcccgatgtccgttgcccttggcgccgctttgtctctgactcctctgtcctttgtatccgcaaaagaaaacccggcccctcaaaacatggctcagcaaacatcagatgtctcagcaaaagatgtcggattaaacattgacgttgacctgctcggcatcggcaattcgattgctgacgcgattaagtcggcgcaaaaccgtgacggcttcgtcaaaaacttaatggaatcttcattctacgcttccggacaaaaatataatgtcatggtgtttaatttaagccaggaatatgaagatcattttaacggcgttcagttttacggttccgccgtttatgacggcatcacgtacggcatttgggtgtttgaagacggaagcttcaccaacaaaggagatggcggctggatcaactgggccttcagaggctggtttgaccgcgacggcgatcacgtcgaattccatcgtccgtaatctaaaaaagtccggcgaacagatgccggactttttttattcatctccgtcaagcatggccgcttccacatcattgatgtattggcgaagctcatgcgacatgtcgcgggaaatttcccgctcttcgaataatgtttggatttcgttgcggatggcctgcacggcccgcagtttgatttcgagtttttgattttcaaaacggcgactcggactctgttcgtgatacgagtgccccagcctgaaaatcaagtgattgtaaaaggaaatgacggcaagcgtcacatctttattttcttcagtcatgtgttttttcaggctttcaatggccgcttttgccgttttaacccttgtggagcgaatgaggccttcttcatttaaaatcgacatttccggttttttatgttcgccgaaaaagatccagtacatcaggcgtttcagctttttcttagataagccgactttaaacgggttcgtataaagcacttccagttcatcaaaccgttcctgaaggctgtcagccgtttcttccggtatgtcgccccgctcaatcagccgcagcaattcttcctgttctgcctgaatcccttgggcgcggactttccgctcatcttttttcgtgcggtttttgacggtgaactgctgaaacctgagatttttcattttctcattgtattcggcaatgaccgcaaaagaagccgttttgtttgactcattcatattttctttaatggcggttaaggcagcctttatcagcttccgtctcgctgtcagcaatttgactttcttttctttcacattgtcttccggcttatctgtcaaaatcggcagaacgattgtcgccagcaccaatgtgcacaaaataacgcccgcggctaaaaagagaatcaaattccgttcaggaaacggtgagccgtcagagagcacgtaaggaatggaaaaggaacccgcaagcgtgaccgctcccctgacgcctgaaaccgaaatcagcagggtcgagcgcaggccgggtttataaatgctctgatccttgttaaaaaaccacttgccgttccaaaaaaacagcacccacaaaaacctgagaatcattaacgtcagcgtaatgacgataatgtacccgatgaccatcatattgttaaacgcggtatcattaaagatgacggaaaccacatccggtatttgcgcacctaaaataacgaaaacaagaccgttcagaatgaacaaaataatattccacgtacttgaagagacgatttgcagtttgaccatcgttgattcaagacggtcctgctccaccgcatgcgtgatgccgccggccacaaccgctaaaatgccggaaacgccgatttcttcagccgcgagatagatgacgaacggcgtcagaatttgaatcagcatatgcatcgtgacatcctgcatgccgaggcgccgcataaacagccggaaacggataatcaaaaaagaaatgacgacaccgctgagtaaaccgccggctgaaatcagaacgaaactgaacgcggcttgcgccagcgaaaatgcgcccgtcacggcagccgcaatcgcaaatttaaaagcgaccaggccggatgcgtcattcatcagcccttctccttcaaggagacgcagaatgccttttggcatcttcacacgccctgacagcgcgctgaccgcgacaacatcagtcggtgacagaatcgccgccagcccgaacgcggcggccagcggaatgctcggaatcatccaatgaatcgtgtaaccgccgacaatcaccgtggcaaacacaagcccgagcgcaagcagcagaatcggcgctcttaaattccaaagttccgcacgcggcgtccgttttccatcgttaaaaagcagcggcgcgataaacaaaacaaaaaacaattcagtattcagttcaaaatgaagcccctgcggaaatgacgccgcaatgataccgagcgccacctgaatcagaggcaccgggataaaggggacaaaccgatttacgatatttgagatcgcgataatggttaaaagtacgagtacgactaaaaatatgtccaaagctgacctccttcatctgctgcatcatatcattattgcctgttctctgcccttgtcaaaggccggagccgatgatcgggcagattcaatatattttccgcacgcaaccattctccttttattttacccgtttttatttaaaatttctcataacgcgctcacggcgaactttttttgccttcagctacattttttccggaaaaagaaaaagcctgttttctctgaaaacaggctttttcgcaagctgcgtcatctgtttcatgacgcggagcagcgtttatgctgcttagtaaaggatagagaacgcaccgccagtgtgtctctatccttggttttaagagctcatcttattcgtgaaaattcgtgccgtctgtcgtcgctttaatgatgccggcgcggatgacgaaatcgccgaagtgttcgccttcctcacgctctttcgcgtagcgcgggagaatggtgcgaagctcattcagaatttcctcttcaccgatattttcccggtacattttgctcaaacggctgccgtcaaacgccgctcctaaatacatattatattttccgggcgcctttccgataaatccgatttcgccgagtgcatggcgggcgcagccattcgggcacccggtcatacggatggtgatttcttcatcccggagcccgttttcgtcaacaatgtcttcaatcttatcaatcagcttcggcagataccgctcggcttcggccatggcgagcccgcatgtcggaagcgcgacgcaagccattgaactgcggcggagggcggaatgctgccagccgtctgtcagaccgtattgttcgattaatgcgctgatttgtttctttttctggctcgagacattgccgataatcaggttttgattagaggtgagacggaaatctcccgtatggactttggcgatttcacgcaatcccgtcatcagcttataattctcatagtccgtgacgcggccgccttcgatgaacatcgtaaagtgccatttcccttttacgcccttcacccatccgtaacggtcgccgttatggtcaaaatgataaggtttcgcttcatccagctgccagccgaggcggttttccagctcggcttttacgttttccagcccgagacggtcaacggtgtacttgaatctggcattctttctgacggaacggtttccgtaatcgcgctgaatcgtaatggttttttccgctacatcatacagctgctccggtttgcagaagccgatgacttttgaaagctgcggataagtggccgtatcgccgtgcgtcattcccataccgccgccgattgccacgttgaacccgataagacggccttcctccacgatggcaatgaagccgagatcttgagaaaagacatcgatatcattggacggaggcacggcgattccgattttgaatttcctcggcaaatacagcggcccgtacatcggttccgtttccgtgtcaggagttcccgccacacgttcctcatcaagccagatttcatgataggctctcgtgcgcggaagaaggtcatcgctcaatttcttcgaccattcgtatacttccgcatgaatttcagactggtgcggatttgaagcgcacatgacgtttcggttgacatctccgcaggccgcaatggtatcgagcagcgccgcattgattttctgaatcgtttttttcatgttccattttaaaattccgtgcatttggaacgtttcacgcgttgtcagcttcaatgtattgtttccgtatttttgcgccagttcatccatgacaagccattgttccggagttgacacgccgcctggcatccggacacgcagcatgaactgataagccggttcaagcttttgtttttgacgttcattacggagatcgcggtcatcctgcaagtagcttccgtgatgcttcatcagccggttgtcatcgtccgggatgccggctgaaatccggtcgagcatgacttctttcaatgtgccgcgcaaataatcgcttttttctttaatttcctcaacatcacttggagggccttccggcgcttttaaaatgttgttcaccatgctgaataagctcctttcaaaccaaaatcaatatacgtcacgctgatagcgttttttctgctgcatgtctgccaggaagctttccgctttttcacggctcatgccgccttcttcctgaatgatatcgagaagcgcctggtgcacgtcatgcgccatatgctgttcatcaccgcagatgtatacggcggctccctgctgcagccattcatacagctctttgctttgttctttcatgcggtgctgcacatatactttttcctccgaatcccgggaaaaagcgacgtccatttttgtaagaacaccgttttgcagccatttttgccattccgtctggtacagaaaatcagtgacaaagtgctgatccccgaaaaacagccatgttttcccttcagctccggtttcttcacgctcctgcataaaggaacggaacggtgcgatgcctgtccccggcccgaccataatgatcggtgtatccggattttccggcagcttgaagttttggttgtgctgaatgtaaatcggaagcgtatctcccggctggagtctttccgcacaaagaatgctgcagacgcctttgcgttctctgccgtgcgcgtcatatctgaccgctccgattgtcagatgcacctcttccggattcgcttctaaactgcttgcgatcgaatagagccgggccggcattttacgcaggatcgaaagaaagtcttccgcggaagcttcccacggaccgaaatcccggacgagatcaagcagatcacggccgttggtgtatgctttcagctgctcttcgtttccttcggccagaagttcactcagcttttgatcagccataaactgtgcggccttttgcaaaagcggctttgttaagacggtaatttcaaaatgagaagtaagcgcgtctttcagcggacggcgctctccttgtttattcaccgccacttcctgttccggattccatttcagctcattgatcagctcatcaacgagcgccggatcattttccggatagatgccgaggctgtctccgggctgatacgcgaggcccgacccttcaagcgaaagctcgagatgacgtgtttctttatttgaaccgcgtccgttcagattgatgttctcaagaacctccgcccgaaacgggttcgttctggaataaacggattcaccgagagcgggcgtctcggcaggcgcttcggctgtttgatttcccgctccttcgttcaaaccgccgatgaccgcttcaagccattccgaaaacggctcatcataatcaagatcgcaatcaacccgcggcgcaagctgggtgccgccgagctcttgaagacgctcgtcaaactctttgccggtctggcagaaaaattcatacgagctgtccccgagcgccaaaacggagtaacggagctcttcaagcttcggcgcgcgtctgccgtgaagaaagtcatgaaaggccagcgcgttatccggcggatcgccttctccgtgtgtgctcaccacgatcagtaaattgtttacttttttcagattattcggcttaaaatcgttcatcgacgcgacggtgacctggaatccccgttcctcaagcgtctttaccgtctgtttcgcaagaccttccgcatttcccgtttgcgatccgtataatacggtcacttctttcgagactgccgggctttcagcaggagcctgagcagcgggcgcggctgtttcaccggattcggaccgggccgcagccaaatagccgctcagccagattttctgtgattctgtcaaggtcggcagaaggcggttaaggagctctgcctgctcctgattaaacggactgttcatgacctgaagttgcaacgatatccacctcacaaggaattaaacgtaacgtacgttatttctataggaattgtcaaaataatattctaattgaaactttaccgaaagtttgtatgtaagtaaaatatataatcatgatgacaacgattaagattactaatgataaaaagccctttgcactcagcaaagggcttatacgaataagccggcgggcacttcttttataaaaggagagggttctcccggagacaatacggtcaaatgatgcatcgcccgcgtacaggccgtatataacagcttacggtcatgttcgctattgtactgggcagcagaggcgtcagcggcgatgacggcgtcaaactcaatgccttttgccaaataaacgggaatgacgcatacccctttttgaaaaggctggttttctttattgattaaacggacaccgctctcggcgctgaccgcctgaaacacttttttggcttccgcggccgttttgcagatgacggcgaccgtctcccagcctttttgtctgagctcccggattgtatccgccaattgttcccgccgcgcattttctgtatccgtccgcaaaacacgcggtttttccccgttccggttaaaaggctcaatgtcatcgccgtcagccagcagcgctttcgtaaattcaacaatctgccgcgtcgatctgtaagtccgcttcaggctgacatacttttctgcaccattgcgaaagcagccggcgagggaagaagggcccgtaatggtatgggcataaatcgactggctgacatcaccgagcaccgtcatctttgccgccgggaagatggtttgaatatacgtgagctgaaatggggaataatcctgcgcttcatcaatgaagacgtgcttcatttgtgtgttttttctttttccttctaacagatcctgcaaatacagatacggagcggcatcttcatacggaagcgaccgttctgcaaatgcgtttccggtcaaagcgccgatgctctcccaatgatcgggcttttcatcagctccccagtctgaaaacagccggagatacatccgttttatatcgagaaagccgagccgtctgacggcctgcttaatcggtttaaaggctttgccgacaataatggcgccaagcaggcgctgttcgcgctgatggtcgtcaaatgcaggttcatcatctgccgcctgcttcttgagtgtttgataaacctcagcatagtcttccttatcaagcagctcgctctcctgcaagacccattccttcttacgctcctttttttcgagagcgctgatttccgcgagaagccattccgccgtcagctccgctctgttcggaatcggcagctgctgatcaagcgaataaaaataggcttcaatccgctcttttgaaatcaggatgtctccccggaagctgatctgtttacatttcaggcccgagaccgaaagcgacccggcatagcggtcaatcatggcctgaaaagctgatgacgctttgtaagcaatggctgcgagccttacggaaagtgcgtccttattttgttcagtcaggcaatattcaagctgctcgtacgggctttcacaatcaaactttcgtccgagccggcggatgatatattcctgaaaggtggcctgctccatattctcttctcccaattccggcaatacggcggacacataactgttgaacaaaatgttcggggaaaacaatacaatctgacgggcatcaagcaccccgcgcccgcggtacagcaagtaagcggcccgctgaagcgccgcggatgttttcccgcttccggcggctccctgaacgatgagatatttgcttttttcatcccggatgatttcgttctgttctttttggatggttgacacgatgtttttcatatgctgtccggaatggccgctcagcacctcttgcagcatttcgtcaccaatcgtcatatccgtgttaaacatcgctttaagcgtcccgtttttaatgataaactgccgcttcagtgtgatgtctccctctatcgtttcttccggaacttcatagcgggcttttcccggggaatattgatagtaaagagatgagatgggcgcgcgccaatcataaatgagaaattgctcgttgttttcatccattaaagaagtcagcccgatataaatccgctcggaagaggactcccctttttccgtaaaatcgacacggccgaagtaaggagaggttttcagcttttggattttttgaagctgccggtattgaagccgatgcgtccgttcacgttctgaaagcatttccgcctgctgtttaatgcttaaaaatgtctcagccgcttcgtgggcatcatccatattcacggtgacatcatcccaaaacgtttttctcaggccgacaatatcctgcttcaatccgcccgatgaggcttcaagatgagtttgtttctgttccagttccttcatgacaaaattgattctttcctgctcttctttccactctttatcacgttttgccatcagcggcacctccgacatcaagctgacaagtccggctttcatcatacaaacatatatgcaacatattattcagcattatggtcaaataccctttttcttatcatatcgggcgtctttttttatcagaagccgttatgcaaaaaaaccgatttcgtttgtgaaatcggtttttttactgttctatatgataggaacgaatcggcaggcgccacctgaacacataactgcagatgcggcatgccacaagcacaagaaacagcacatacaaaccggcggcatccccggcccagccgaggcccacgattaaccctccgagcgcggcccagactgcataaatttccgccttgagcacaagcggctttctgcccgcgagcaaatcccgtatgatgccgcccccgctgccggtcaggaccgctgccgcaatcaccgcactgagcggatggcccattttcacggcatataaagcgccttggatggcaaacgccgaaagcccgatggcatcggataggttgccccatttactccaatgccttaacagcagcttcggaaacaaaaagacaatcgtaactgatgcgagagcgatttgaaaaaacgcgccttgctcccacaaggcggagaccggaacaccgatcagcaggtttcggatggctccgccgccgaacgccgttacaatccccaagatatacacgcctaaaatatcatactcctcttccatcgcaacaatcgctccgctgaccgcaaacgcaatgatgccgattacactaagcagctcccaggccattccatatgctcctttttatttgttaaattttctgacgaccattagattttataatcgctttctcttaaaatcaaccttatttttgaaagattctgattcctgatccgggacaacctcatccgcaacggctgaaagcaagaatattttcctattttatactttaatggaaggtttattggaagtttcattgaatactttctctaacaaaaagggggttatgagatgaaaatcagttcacttgtttttcctgttttattggccgccggattaattcccggcctgccgtcagccgaaagccatacgcattcgcacactcatgcggagccggcgaaaacggtgtatacggacccgcttccgaaagccgatcattttaaagatctgaaaggcccggtccaagttgaacagacggttgacacaaaaattctggatgagaacggcaagcaggccggcacgaaacgattcaatgccaatgtcagtcaggataaagcctcaactaaagccagcacgggctcccagaaggtcagagtgctggcggtggcggacgctgaataccgcgccaaatacagcgactggcaaacgcgaatcgtccagatcgtggagcaggcggatgtcgcttttaaccgtgatcacaacattgatttcgtcgtacaggccgtgcaggcttggaattcttccggctcaaacagttctcagattttatcgaatctccaaagcagcttcagaaatcaaaattatcattttgtcgtcggttttaccgcaaaatcgagttttgacgccggcggtatcgcgtatgtatataacggcaaaccgagcggcccggctttcagcgtgaaccttgatcaaggaacggccaacacggcgaaagcggcacagcacgagttttcccataacttcggacttcagcatgacgcccaaggcagcggcatccgctgcgtcatgaattatgattatgcctattccgtggatatttgggacagctcccataacagacagattgcgacaaacaaagcttggtacaaataatagaaaaagagccgctcccatggagcaggctctttattttgccgtgcgttccgttttgacaaaacacatgcagataataatgagaataaatgccgtcaatgccaagaaaggaatggtaatgaaaccgaaccagttaatatattcagatgagcaaggcacgccgtagacacacggcttgatgccgctgaaaccgggcaccttctgctcaaggtaatgcatggtcgatataaatgcgccgatgacggccatcggcagcacatattttttcacgcgcgtgtcaccctggaaggtggcgattcctaaaatcaggacaagcgggtacatgagaattctttgataccagcacagctcgcacggtatgaattttctgatctcgctgaaataaaggctgacgagcatggcagcaagagctatcacccaagaagcatataaaaacacgattctatttttcatttttcagctctttcttaatcgtttttgaaatctcatcatatttagagaagtcattaatcaccttgtcatttacataaatcgtcggtgtcgccgtaatgtttaatttatcattcaggtcagtgtcagctttcagctcttttgcgaaggtttctttatcaaggttttccttcagcttgtcaggatcaacctttttcgcggtgcttttgaccgttttttcaagcaatgcaggcgtgacccattcctgttcgcttgacggctgctcttcaaacagcttctcatggaaagtccagaatgatgccgggtcttccttccacacctcttctgaagcaagagccgccagacgcgagccgcttccgtggtacatgacgttcacaaatgaaaatttcacgtcgcctttatcgataaaatcttttttgattttcggaaagatatcgctgttaaatactttgcatgacggacatttgtaatctccgaattcaactaccgtaacaggcgcgctgtctttgccgagcacgggctgtcctttaatggaaggctgttcggcgactgtttcgcccgctttttccgtttggttgttaataattacgatggccgcaaataaaacgacaacgattaacgtcagaatcaccgcaaatttcgcagacgattgtttctttttcactcagacacctcattgtttttaaaataaaaaagaagcggatgccggatggcccgcttctctattttaccaagacaaccttgtttaagaaaaccctgaaaaacgaattatctttgacaattattccgctttcactctcatgacgcgcatcgcgttggcaacggcgatcagcgtgacgcctacatctgaaaagaccgcttcccacatggtggcgaatccgaatgcgccaagcaagagaaaaatgatttttacgcctaaagcaaatccgatgttctgccagacgatccggcgtgtgcggcgtgcaatccggatggcttcggctgcttttgacggctggtctgtcatcaggacgacatcggccgcttcgacggcggcatcagaaccgagagcccccatggcagctccgatgtcagctctggcaagcacaggcgtatcattaatcccatcgccgacaaacatcagtttttcattcggtgaaagcgccgcttcaagttcttcgacgcggtctaccttgtcacccggcaaaagctctgtgtacacgtcatcaataccgagctcgaggccgacagcttctccggtctgctttgaatcacccgtcagcatcactgtccgcttcacgccgagcgcttttaaattggcaatggcctgtttggcgtcctctttgatttcatcggcgatcacgattgcccccgcatactgctgatccacggcgacataaacgacggttccgttattttcagctgtgccggaagcgatttgttcttttgccagcagtttttgatttccggccaaaatcgttgatccgccggttttcacccgaatgccgtgtccgggtatttcttcatattcttcaatctcctcagccgcgagcggttgattgtaagcttcgcggatggaagaagcaatcggatgattggaatggacttctgcaagcgcggctgcatgaagcaggctgtcattcgtaaatcctgccgccggtttgatatcagtaacggcgaaattgcctttcgttaaggttcccgttttatcaaacacggcgtatgccacctgattgagcgcttctaaatagttgctgcctttcacgagcacccctgctttagacgcagccccgataccgccgaaaaacccgagcggaatggagacgacgagtgcgcacggacaagaaatcacaaggaaaatcagcgcgcggtacacccagtcggatagcgcggctgaaggcacgagaagcggcggtaaaaaggcgagaagcaccgcaacaatgacaacggccggtgtatagtacttggcaaacttcgtaataaagttttccgttttcgctttgcgtccggccgcattttcgaccagattcaatatttttgacacggcagagtcttcataccctttagaggtttcaatatgaagcacgccgttctgattcataaatccggccatcacctcttgccccggctccgcttttctcggcacggattcgcccgttaaagcggatgtatcaaccatcgaggaaccgctcagcacctttccgtccagcggaatccgttctccgggattcacgatgatgacctgtcccactttgacgtcctgcgggggaacggcagccatgccgttttccgttttcacattggcgtactcaggacggatgtccaataacgcgctgatcgattttctggatcggctgacggccgctccctgaaacaattcaccgatctggtagaacagcatgaccgcgacgccttccggatattgatgaatgataaatgcgccgattgtggcaagcgccatcagaaaatgctcatcaaatacctggccgcggacaatattttttcccgctctggctacgatatcgccgccgatgatcaaatatgaagcaaaaaagagcagaaactcaaggacggcgcccgtgtgcgcgaagtaagcgatgacggccaaaacggcgcccgccgccaatctcactaacatcagctgcagctttttgcggtattcatcctcaccgggtttgtcttcgtgcttcgaacgaacggtcacatgaggatcaatggactttacttttttcgcgacttcatctttcatccattgctcgtttttcccgccggctgagaccgtgatggtgcttgccgcaaaattgacagcacagccgtctatgccgtcaatggcttttacgccgttttctattttttttgcacagttgctgcaatcaagtccgtctaatacaaattcacctttggctgctttcattttcgactcaccctactttccgtaataggattcccataacatcaatacaggtaaacgaatttatatatatgagcatatactcatataagtgttttctctattatatgcaggctttgaataaagtgtcaataaaaaagacaaaaccggcatcagccgattttgtcttttttcaccttctgtaaacgcaaagcattaagcacgaccgataccgagctgaacgccatggcggcgcctgccacccacggagccagaaagccggctgccgcaatcggaatgccgatgctgttgtagcccaatgcccatcctaaattctgcttgatgtttctcatagtcagccggctcatgccgatggcgtcggcaatgccgttcaggtctccgcggatcagcgtaatgtccgccgcttccattgcgatatcggtgccggtgccgatggccattccgatatcggccacagccagcgccggagcatcattgatgccgtcaccgaccatcgccacgcgccggccttctttttgcagccgggaaatttccgccgccttttgttcgggaagcacttcggcgatcacgctgccgatgcccgcggcttttgcaatggcttccgcggtctttttgttgtcaccggtcatcatgatgacgtcaagccccatatcattcagacgtttcaccgcggccggagatgtttctttaatggtatcagcgactgcgataagccccgccgctttgccgtctgccgcaataagcatcaccgtttttccttccgcctccaagcgggccatttgcggaagcagcgcttcatgttcaatatgctctgattccatcagccgtcttgatccggctagaatcgttctgccgtcagcctctgcatagattccggaaccgatccgggcttgaaaccgggtgagtttcgggatggaaatcccccgtttttcggctcctgacacgatggcttctccgagcgggtgctctgatcccgtttcggcggccgccgccagccgcaggagttcctcttcgttcattccctctgccggtacggcatctgtcagaaccggtctgccgtttgtcaccgttcctgttttatccagtacgattgtcgtcagacgctgggtcttttctaaatgctcaccgcctttaaagagaatgccgaattcagctgcacggccggagcccgccataatgctcgtcggagtggcgagccccagtgcgcacggacaggcaatgacaagcacggcgatgaatttgccgatcgcttcagaaaactgtcccggcgccgcccatacataccaaatgagaaaagtcagcacggccagccccagcacaatcgggacgaaaatgccggaaatgtgatccgcgagccgctgaatgggggcttttgatccttgggcttcttccacaattttaataatgtgtgcaagcgcggtatctttcccgacattcaccgctctgattttgagaaagccgtttgcattgatcgtcgcccctgtgacggtgcttccgggagacttatcgacaggcatgctctctcccgtaatcatcgattcatcaatcgcggaatggccttcaatcacttcgccatcgacaggaacgcgttctccaggtttcacgtatacgatatcccccgtccggacctcgtcaatcggaatcacctgtactttgccgtcccgctcaaccgccgccgtcttcgcctgaagcttcattagctttttaatcgcttctgatgagcggccttttgctttcatctctaaaagctttccaagcaatatcaaagtcagcaaaatggcgctcgtttcataataaagcccctcagcatgtccgtctcgcccgagagacgcaatcgtcatgtacaggctgtatgcgtaagcggccgtcgttccgagcgcaacgagaacatccatattggcgcttttgtttctcagcgccttgtacgctcccgtataaaaaggccagccgatgacgagctgcaccggggtggcaagcgcaaattgcagccacggattcatcaggatatccggcatccagataaaagaagtaaaagaaaaatggctgaccatcgaccataaaagcggaaaggagagaacggcagaaaatatgagcctgatcagctgctttcgctgctctttctccttttgggataatccgccgtctccatcaaccgctttcttcccgtctaatcggtagccgagttttgccacggtctctttcagctctttcggcgtcacctctttcggattgtattcaacggtgactgtttccagggcgaaattcaccggtgcgctcacaacgccctctgttttgttcaggcgcttttcaatccggttggcgcaagcggcgcacgtcatgccttcaatctgaaaatcggctttttccgtcacgacgtgatagccgagtttttcaattttatcctttatggcgccagcttcgattttgtcaggctgataggaaatatttgagatctcaagcgcaagattgacggaagcgtcattgacgccgtccatccgtttcagccctttttcaattcttgaagcgcaggcggcgcatgtcatgccccccacttgaatggtcatttctttcggttcactcaatgtcctcatctctcttcataaaccccacgagggtataattatgataaaagaaaaccgcgcccgttcccgcagcgcgataaaccttatacgacgtcatacccttgatcttcaattgcgtcttttatatctgatacggagactttgtgctcatcaaacgtcacatccacctgtccggcttccaatttcacctgaaccgccgtcactccgttcagttctcccactccggtctctactgcttttacgcagtgctgacaggacatgccttccacttgcagtgttttttgttccatgatgattccctccacgtcttgttttttcttttttatgttaccatacccctgtagggtatttcaaaacattttattttacgattttgcgatttttttcacaacatcaagcagctcggcaatcgcctgctccccgtttccgctctcaatggcgccggctacgcagtgatgggcgtgatcttccagcagatgaaacgcgactttctgcatggccgcctgcacggctgaaatctgcacgagaatatccacgcagtatcgttcgttctccaccatattctgaatgcccctgacttggccttcaatccgtttcagccggttcagaatctggtctttttccttggcgcttttatgatttaacgattgatgctcggtatgtttgtccattttccacctcggtttttttcttcgttatcttcattatacagacttgaaaatccggtgtaaaaaattttcaacacacaagttttaccagtacacccgcggggtatataatgttatcacatatcaagagggggaaattcattgaaaacgatacaggttggcatattgggatatggtttgtcgggtaaagtctttcatgcgccgcttttggacgtccttgatgattatcagatcaaaaaagtcatgacctccagaacggatgaggtcagacgtgatctgccgggggctgaagccgtgcgcgcgattgaagacattaccggtgatcctgacattgatctcgtcatcgttacgacaccgagcggaatgcattatgaatcagcgatgaaatgtctcctggcgggaaaacacaccgtcgtggaaaaaccgatgacggcgacttcagcagaagcggaggaactgagaagaacggctgaagataaaggcgtcttactgagcgtgtaccacaaccggcgctgggacaatgactttttaacgatacaaaagctgattcgggacggggcgcttcaagacattcatacatatcaagtcaactacgatctgtacaatccggttgtccaagaaagatggcgcgaaaaaagcggacccgccacgggaacgctgtatgatctcggttcacatattattgaccagacactcctgcttttcggaatgccggaatccgtcacggcacatgtgatgaaacagcgggacaacagtgaaaccgtcgattattttctggccgcgctccattacggcaaacttcaggtcattcttcaatccggctctatgaatgcggcaaacggcccgcgctatcagattcacggacggaatgcaagctttatcaaatacggaaaggacggacaggaagaggcgctttcagccggccaaaagccgattgacgacagctggggcgccgatgaccctgacaacttcggagagctgacaatcgcagcggatgaaaaaaggcatacagaaacaatcccctctgagaacggctcttaccttacgtactacaaactgctggcggacagcatcttaaacggaaaacagcttcccgttacggcaaaagaaggcatcgatgtcatccgtgtcattgaagcggcgatgaaaagcagcgagcaaaaacggacgattgccctttaatataaaaaacctcccagccgtacggcggggaggttttttttaagatcagaatgattttccggcttctttcgcgcgggcaatcgcatcttctttaatttgctgtgctttattcggttcagcattatggccttcaacgattaaaccgtcaaaagaaggaacgccgaagaagttcatcatgatgccgatgtaacggtggcccatttccatgtcagccgccgggccttcagagtaatagcctccgcgcgcctgaatgtggagcgcttttttgtcagtcaacaggccgatcgggccttgctctgtatatttgaatgattttccggctacagccacagaatcaaggtacgctttcataacaggcgggaatgagaagttccaaagcggtgtgacgaatacgtatttgtcagctgacgcgaattgatcgctcagctcgttcagacggccgactttcgctttttcgttttcagaaagctcttcaaatcctgtgccggattgaagttttccccagccgctgaatacatccgcgtcgatatgaggaatgttctctttgtaaaggtcgatatgtacaacctcatcattcgggtttgattctttataagaatcgataaacgcttttcctgtcgccatgctgtaagatgtcttttcatcatgaggatgagcagtgatataaagtacttttgccattgtaaacagccctttcgttttcaaattacacacacatttattatgaaatatgaatgtttttttatactgatcagttctgtaataattatagttacaaaaaattcttttcgcaacaataatatctcgaaatcagtatattttttaaaaaaggctgtaatgacgggaatggcaagcagcagaaaaagcagaaacatttagtttctgctcaaaatcggatttggtttgcagatcggaatatccaacccgagattcccccgcaatgtatccgccggatagctttttcggtacagcccctttttctgaaggatcggtatgacttgatccacaaaggcttcaagcatgcccgggatgtcagagtgaatgataaacccgtccgccgcttcccgctgaaaccatgtttcaattaatgatgccacacgttccggtgtcccgataaagttcgttcgcggaaacgcggcttcgcgcgccacttgacgcagcgtaagattcctggctttagcctctcttttgatacggtctgtcgtgctttgaaacgcgtttttcccgacgtcgcccaaatcaggaaacggctcatccagcggaaaacggctcaaatcataatcgtcaaaaaatctggccacatatttaatggcgttctctatcggtatcagctcggcgaattcctgatatttcgcttccgcttcttcttgtgaaccggctataatcggactgattcccggaaagatccgcagcttggaagcgtcgcggccgtaatccgccgcccgcttcttcacatcatcataaaaagctttcgtttcctcaagtgaattggagtgcgtaaagactgcatcggcattacgcgcggcaaacgaccggccggtttctgaagaccccgcttggaaaacgaccggctctccctgtttggaccggccgatattcagcgggccctccacttgaaaatactcgcctttatgatataggcgatgcagtttgtcaggatcaaaaaactgcccggtttctttgttgcggacgaaggcatcttcttcccaggaattccacagaccgcgcaccacgtccacatgttcttgagcgatgtcgtagcgccggctgtggtcgggaagactttctttgctgtgattgcgcgcggctcccgcctgcggagaggtgacgagattccagcccgcccggccgccgctgatatggtcaagagacatcagctgtcttgcgatggtaaacggctcagtgaacgaggtggaaaatgtgccgattaaaccaagatgggttgtagaggcggcaagcgccgataaaatagtgatcggctcaaaccgatttaagaaatgcgggatggacttttcagaaatgaacaagccgtccgcaataaaagcaaagctgaacagccctctttcagcagtctgcgctttttgcctgtaaaacgccgcattcgtgcttgctgtcggatcggcgtcgggatgacgccagccgtccgttgtgccgccgacaccgtgaatcatggctccgaattgaattagatccgtccggctcattttctctccccctttttcccctcgtaatcggcaagcgcccgttctacatgatcaatgccgacttgagtaacggcctgatacacacggctgtcaccgctgccgatttcaacgacggggacatgacggatgccgtacttcgtctgcagcacgtcacgcaattcgtcccgttctgtcacatcaattgtttcgtatgcaacggctttttcccgcaaatatcctttcacttcatcgcaataggagcagccctgtttgctccagaccactacgtttacttcatgactcatgttcatccctcctataattgtggggccggctgcaccgcttcgcttaacagccggtaagacaatcgtttttcctcagcgtttttgataggcgacaaaatcacaaaatcggtaatgctgtattgaacggataatcgtctcagctcggcggcggtctcttcttttgtcccggcaatcacacccgtcttttgtgtgatcagcttatatggctgcgtgacttgttccagaaacgcttccgcttgttcccgggaaccgacattcacctttttgccgtcttcgagaatgattttgaccgactcacgcgatacgacgtgtttttccgcttctgcttttgtatgcgcggtaaataccatcggcgcaaggtgaaattccgccttcgatcctttcggcagatgctcgtcaaaggcgtggcgcgctttttctaacgcagcctcttcaccgtttatgaaataggcgaaaacgaaggaaatgccgagtttggccgcggatatcgcgctttccgcgctgctgccgagcaaaaagatgtcaggcgcatactcagtatgcggcgtcggccgcaatgacgcgtagcggtgcgagtccggaaaatcatttcgaatgaaatgagtcagctcctcaagcttttcttcaaacaaacgggcgggctggataagctcccgctgcagcgcatcggttgacagctgaaatccgccgggcgctttgccgacaccgagcgccacacggccgggagcaagggcggacagaacccggaactgctccgccactttataaggactgtaatgctgcagcatcaccccgcctgatgcgagacggatttttttcgtgcttgcggcaagataccccagaacaatttccggcgctgatcccgctatctcttcattgttatgatgctccgccgcccagaaacggtcatatccgtattgttcggcctcctgagccaatttcaccgtttgccgcaaggcttcttctgcggtttggttttccgcggtgacactttgatctaaaatgcttaaacgaatcatacgacaggctcctttatgcgctcttttatgtcataaccgtaatcaggcagcacgcggcggaggaacttcttcgttctttcttttttcgtcttgtgaaaaacttcctcaggcgttccttgttccacgattgctccttcatccataaacacaattcggtcggacactcttctggcgaattccatctcatgtgtgacaatgatcatggtagcgccggtccgcacaatgttaagcatcacctcaagcacctcgccgacaagctccggatcgagggcggcggtcggttcatcaaacagcatcacatcaggatgaatggcaagcgcccgggcaatcccgacccgttgcttttgtcctcccgacagttgattcggataggcgtgtagtttatcctgaagccccaccttggccagttcccgctcggcaatggcgtacgcgtctgtttttttcattttccttgcgaccgtcaggccttccatgacattttgaatcgccgttttatgcgaaaacaaatgatattgctgaaaaaccatcgctgtctgtttcctcagtctgagaatgtcttttttggcaggctttttgcagttaatgacttcaccgtgcagcgaaatggcgccctcatccggccgctcaagcaaattaaggcagcgcagaaaagtggttttcccggaaccgctcgggccgatgatggtcacgacttctcctttccggacacttaaattgatcccctttagcacgtgatgactgccaaaatatttctgaatgtttcggatttcgatcataatgcgcctccttgatatctggccgctcttttttccgccagactgtttacagcttcgagaatcagcgttaatccccaataaatcacggccgccccgataaatgcttccagaaacgcatagttatcggatgccgcaatcgtcgccgttcctgtaatttcaggcactgcaacaattgccgcgatggaagtggtatgcaaaaagccgatgcctatattggtgaagttcggcagcgatatcatgaacgcctgcggcagaattacgcgccgaatcaactggccccgcgtcagaccgattgaatatgccgcctccgcctgccccgtatcgacggccatgatcccggatcggagaatttccgtcatataagcgcctgccgttaatgacagtgccatgatgacaaacacggcgaccggaatctgattggctgaccagccgagatgaaacgcgcggctgaattgatcggcaatcagcggaacccctaaataaatcagcataatatggagaatcgccggggtgctgcggaaaaaagacacgtaaaacgctgagcaggccagcagccatttgatgcggaatatacgcaccgtgatattgccgagagctatgaaaaatccggcaataatcggaatgatcgtcatcgccaatgtaagcggaacggttttcaacatttgttttatcgcagtgccgataaacggaatgtccagctccactgttctccctccttttcagccgtgcgcactcatgtcaaaaaccgtcacaaggcgcgtctcatctttcttgattcgtttttcggcccatctgaagacacattcaaataaaagggcggccgcgtaatacagaacagacagcgagatatacacttcaagagaatgattgctcgatgtaatcaaggtctgtcctctgcccgacatatccatcaccccgatcgaaaaagcgagtgatgtatcttttaagaaaccgatcaccatattcccgatgttgggaaaggcctgcacgagcgcctgcggcagaatgatgcgccggaatgtctgccctctgttcagcccgatgctgaacgccgcctccgcctgcccgcggccgacgctgttcacacctcccctgatgatttcggccgctcttgccgcgctgctcagcgcatacgtggcgatggccgcatacaaagggtccattttagaggtatcaattccggcgagcgccgtgagcgccggaatgccgtaaaatacaatgaacagctgcaccatgataggcgttcctctgaaaaaagagatatacagcttcgcaaactgattcaaaacgggaatgcgatagatgcggggcagcgccaaaagcagccccaatagaaagccgaacagcaaagacaccgccaatatatacagcgtgacgggcaaatacccgagcaatgtcggcacaaaggacgcgatcatactgatatcaaacgctttttccattgccggtccctctctttttcacttaatattgctcccttgaataatccgcgccgagccacttttcactcagctttttaagcgtgccgtcatcaatgatttccttgagcgctttatcaatgtcatcgctcagcgtttgttcatttttgttaaacataaagaacactttggcatttgacagcaccccgccgaccgttttttctttgatcgcgctcgttttgttttgaaaatcgacagcaaacggcgttgaaatcgttgcatcggcgcggccggatttcagctgattggccgcatcgtttgaaccttggccggcataggcgatttcaaaaggactgccgtgtttttcattccattttttcaggacaagcgcgccgtttgacgtcggacttgtaatgacccgctttcctttcaagttattaatgccgtgaatgtccccattatcttggagcaccgtgattttcagcgggaagttgttatacgcgacttgattgaacagaaattttttctcccgttcggcgcttttctccatttgatgagccacgatatcgactttatgctggccgaggctgacaagcaggttggagaaatccatcgttttaaaggtaaatcgatagtccggcaggcgcctgtcaagctctttcaccagctcaacgtcgtagcccgtcaatttgcctttatcatcaataaagcaaatattcgaaaattgagtccccgtgccgaccgtaatgttcttcacgtttttctgattgcctgatgccgcctcccctcccgcgccgcaggctgataacgccgccgttgccgcaattgttaatgacatgaccgccaatcttattttcatgtgatcgccccgttttctgcttcaattatttcgtgaaacttgattttgaataatccgcgccgagccatttttcactcagccttttcaatgtgccgtccctcacaagcctttgaatcgcccgatccgtatcgtccgccagggtttggctgtttttattgaacataaaatacacctcggtatcgagcagcacatcaccgaccgtcttttgtttgaacgcgtgcgtcttattttgaaaatcgacggcaaacggcgtggatacggtggcgtcagcgcgtcctgtctcaatttggttcgctgtatcattgccgccctgcccggcgtatttcaaatgtatcgggctgccgtgggttttgttgtatgccgtcatataatccgccgcgtttgacgtcgcgccgacgatgacggttttcccttttaaatcccggagcgtgcgtaccgcgtcattatccgccttcaccgtgatgtacatcggcgagtagttatacgggattttgtgatacaaaaagcgtttctcccgttccttgtttttcgccatattgtgcgcgatcacgtcaattttccggtttccgagacttgtaagcagattcgaaaaatccatcgtcttaaagacaaatttgtattgcggcagctgttcatcaatggctttcatcacttcaatgtcatagccggtcagctcgcctttttcatccataaaagcaatgttcggaaaatcagttcccgtgccgacgatgacggtctgcacgccgctccccgcttttgcgctttctccttgcccgcacccggccagcacgccgagcagcagaagcagacagccggctctgatccgttttttgatcattgcgcccagctcggtgtgcctaacagcgacgcgtcaaaccgctccggtatgagcacctttctcatcataactccgatgtctccgtctttctcctgctcaaaatacacttcatatcccctccgtctgtacatatctacaagccagggatgcttgcgcgccgaagtgccgagcgtgatggccggggccttcagcgtatcccgcagcacatgttcctccacataagtcaaaagtttgctgccgatgccctgccccttcagctcaggaagcgtcgcaaaccaccagacaaacggatattttgacggaggcgtgtcactctcccacggaaaacggatcgtaatggttgaaagaagccgtccatcccgttcgagcacgacggctgaatgattttcaatattttccgttaccatatcgatgtcggcccgcgccgacggccagtcaatctccaaattgcggatcggctgaaacgcgctgtacagcagctctaaaaactccggcgcatcctttttctcagccaatcgaaatatgtcttcactcattccggtcactctccccgcaaaaaatatataattccaatttgtttactaagctttgattgtttatactataaagcaaactgatttgtttgactaatcaaaaaaagtaaaggaaaggttcaagaaaattaatgaacagccgggaggggatttcgttggaactacgaaccattaaaacgtttcataccatcgtacagtcaggcagcttttataaggctgcagaaattctgaactactcacagccgacgatttcaatgcggattaaacagctggaacaggatgtaggcgcgcagctgtttgaacgtggaaagaagctgaagctgacaagggcggggcggctgtttcatgagcgggccgggcagcttctcgcgcaatacgaggtgcttgaccatactctggccgatatcagacagggccaggccggccttattcagatcggcatatccgaaccgacggcaagcctgatcttccctgccgtgctgcggggtttcttaaatgattatccggacatgtcggtcaatgtcagcgtggatgatgccaatacatgcagccgcaaactgctggagggcgctattgattttgcggtatgcggcgagccggagctgattctggaaaattatttcgatccgtttttccatgactcgctcaatgtcatcgtgtcagacagacatccccttgccgccaaagcaagcgttaatctcgaagatttagaaaatgaatgcctgatttttacgcccgccaattgcccgatccggattcaaattgaacagcacctgcagcgggccatcgggagccgctatcgaaaaatggagctgaccagcagcatggctcatcaatactatgtcagggaaaatatcggcgtctcaatctttacggcgacggcgcattcagagccgatcgagggcacgaaggtcattccgatccataacttaacaatttcaccgcctgtcgggcttttgacaaaccaaaaagaagagcactttgactgtgcaacaaaagatttaatcagcaggatcatcagccggtttcagcgtgatccgcattaaaaaaacccccgccactttgcgggggttttttatgttcatcttatataatgctccgcaccaagccgccgtcgatccgcaatgcagatccgttaatggcagacgacagcgggctgcttaaaaaggcgacaaagtgggcgatctcttccggacggatcaaccgctgaatgatggacgtcggacgattttccttcataaatcgtctctccgcttcagccgctgtcaagttttcaccgggataaagcgactcaagcattgtttcgacgccctctgttttcgtggagccgggcatgaccgtattcaccgtcacattcgtcccttccgtgagctcggccaggctgcgtgacagcgacagctgcgttgttttcgtagcgctgtaatgagccatttcctgagaaggcatgacggccgcttcactcgcgataaagatcacccgtccttccttccgctcaatcatccgctttgcataccggcgtgtcagccgcacgccgctcatgatattcacctcgaaaaaccggagccactcttcgtcaggaatatcaaagtattccgcaggttcaaagattcctaaattgttgacgagaatatccacatcaggatactgctgaaaaatcgcgccgcatccttccgccgtgcctaaatcaaacgcggccggatagagacgggcatccggcgtctgtttctctagttcccggatcgtttcgttcaccttttcttcacggcggccgttaatgatcacggccgcaccttctgcaatcagcgaagccgcaatcgccttcccgatgcctgacgtagatcccgtcacaagcgccgtcttccctttcaactgcaagtccatcatccattcctccctatcgcaagtctcttcttatatatggacagaaatcgaaagcctgaaaccttccgtccctattatcggatagaaaaatggatgaggggaagtacgcactttttagtgcctgtccgttgtcccggctgacggctgatcaatttgaatgaaaaattcaccatctaattctgcctgagcctcttgaaacagctccaagacatcatcagcatccgaacccaattccttctgactgatctcaaaattcttccacaccaaagtcagcggaagttcgatccagcctgtcagacaatcccataaggcgttcagattttcaccataaaagtccgggaaatctaattgatcttttaagattcggtgtaaagcttctgtgcttgtaacatcttttccgtctatgatgacgatttccatttacattcactcctttttgtcggcataaaaaaaccgcagtgcgtcatgtgacggcactgcggttcctctgttatgtatggagacggtgggagtcgaacccacgtccagaaacatcgattacttaagcgtctacgagcgtagcctgcatatttcgtgtttcactcgtcttcatgcctgcgggcgggccttccgagagctagtctgtcagtctcttcttacgttctcagacgggaacgcaagcgtagcctacttggatgtgctcttcacggacacataggcaatgtcaggaagagctcgctgcgtttattaggcagctagtgctaagttttggttaaaacttttagttttgccagttatatttaggtgcgtgttaacgagatcgcctctcggctcgcagctcaagctcgatccatccctgtcgaatccgtaacgtccccttgttaagggtatacgggagatctatcaagctcttgctcaactggctgtactgttattataccatgatcacaggcaaattcaattgggaatatcttcaataaacagcctgtgaatctgatgtgtgaacagtatagcacagggcatatcatcacatcaaggctcaggcatcagaagcctttttgtctgtctctgaacgctctttcgatttctcttttggcgtcttttcgttttaaatcttcacgtttatcgtatgttttcttcccttttccgaggccgattaatactttggcgaagccgtttttcaagtacagcttcagcggcacgagggaatagcctttctctttcgtcaggccgatcagcttattgatttctttccggtgcatcaaaagctttctcgtccggagcgggtcgtggttatagcggtttccctgctcgtacgggctgatgtgcatgttgtggaggaacacttcgccgcgctcgattttcgcaaaggaatccttcatgtttacgcggccggcgcggatggacttaatctccgttccctgcagcacgatgcctgtttcataggtttcttctataaagtaatcatggtttgcttttttgttttgcgataatactttgcctgatccttttggcatgccttatcctcctctctccgcaaaaaccgttcatgtgtgcgatacgctttattttagcaaatggagcgttccgcgacaatgaaaatgcggcttgcgaaagaaagcaaacagagcattatgccctatttgcttttcgcatttacttcttctttttgcgtttttgtttcggcgcgttttggaagccgcgttttttctttttcttcttcggttttgtaaaccattcccctttttcctccgatttcggcggtgaagccggggtattgctgtttaacacgcgtttccgcgccggtctgcctcgttttctgcggtcgcctgttgtttctctcggacggcgggtgcctttcatgccgacaatttcaaagtcgatgtttctctcatctttattgacgtcgacgactttgaccgtgatttcgtctccgatgcggtaaacgttgcccgtgcgttcaccgatcatggcgaaatgctgctcgtcaaaacggtaataatcatccgtcataaagctgacgtgcacaagcccttcaatcgtattcggcagctcgacgaacattccgaaattcgtgacggaactgatcatgccgtcaaattcctcgccgattttatcaagcatatattccgcttttttcagatcgtccgtttcccgctcggcatcaacggcgcgccgttccatcgttgacgtatggtcagcgatttccggaaggcgttcggcccacttttcctgagttgcttcgtccgattgtccgttgatcaaatacgttctgatcagcctgtgaacgattaagtcaggatatcggcggatcggcgatgtgaagtgcgtataaaattcagtcgccagcccgaaatggcccaggctttgcgggtcgtatttcgcctgcttcatggaacggagcatgaccgttgaaatcaccgtttcttccggacggtcccgcacttcatcaagaatgctttgcagcgcgcgcggatgaatgtctccggctttccccttgacgatataaccgaatgtcgtgacgaactccaagaacttttgcagtttttcggcgttcggctcttcgtgaatccggtaaataaacggcacgttcatccaatggaagtgctcggccaccgtttcgtttgcgacaagcatgaattcttcgatcagcttttccgctactgagcgctctctgatgacgacgtcttttacggcgccttcctcatcgacgagcaccttcgcctctttgaaatcaaaatccacggcgccgcggtccatccgtttcgcccggagaatttccgccagacgttccatgtctttaaacatcgggacgagcggctcatatctttctttcagctcggcgtcgtcttctgtaaggatccggttgacatctgaataggtcattctttccgtcgttttgatgacgctttggaagatctcgtgctccgtcacctgtccctgctggttgattgtcatttcgcaggaaagcgtcagccggtcgaccttcggatttaaagaacagattccgttagacagtctgtgcgggatcatcggaatgacccggtcaaccaagtacacgcttgtccctctttccagcgcttctttgtcaatcggggaattctccgtaacgtaatggctgacgtcggcaatatgaacgccgagcttgtagctgccgttatcaagctttgtcacggtgacggcgtcatccagatccttcgcatcggcgccgtcaatggtgacaatgacctgatcgcggagatcacggcggtctttgatgtctttttcatcgatggtatcgggcgtgcttgttgcctgctccatcgcttcagccggaaaatctcccggcaggccgtgcttatggatgatggataaaatatcgatgcccggatcatttttatggccgagtatttcaacgatttccccttcggcgttcattctgccttcaggatagcttgtcagtttgacgacgactttatggccttccgcagcgccgttattggcatgtttcggaataaaaatatcactcgtgattttcttatcatccgggatgacaaagccgaagcttttcgtttctgtgtatgtgcccacgacgcggtcgatgcttctttccaggatgcggatgaccgtgccttcctgtctcgatccgcttgactgggaattgagccgcaccatgacaatatcgccgttcatggccgtattcagctcgttcggcggaataaacacgtcgcttaaagaggtatcctccggcagcagaaacgcgaagcccttcgcatgcgcggaaatttttccttttactaaattcattttttccggaagcccgtagcggttgcttctggtgcggacgatctgtcccgtctcctcgagcgccaccagcgcttttaccagctctttaaattcatcggcttccgtgatgttcagcatctcctcgagttcctgaatggtaagggcttgtacgcctcttccttcataaacgcgagaagacggtccataaacgcttctttttccattattcgacctcctgtttgttaccaatcgagtttctctaaaaattcgtacacatcctgatgaacgaggtcccgttctttatcgagtgtaatgacatggcctgattcttcataccatttcagctgtttgtcgtccgtttccacctcgttgaaaatgatgttcgcactttctgtattaatcatatggtcatgccgtgcctgaaccacaaatgtcggggaatagatcatgtcgacgtttttgcgcacatcggcaatcagctcctggagcgatttgagcgtattcatcggcgttttttcaaactccttcatttccttttcaatctgctccggctgttttccttcgaattttttataattgcgcgcgtaggagagaactccttcgtacataacctcttcacttttaatgtgcatcggcgcacacataggaacaattccctttatgggtacagtgtaacccaatttcaatgaaaaaaccccgccaagcgacagtccgcacgccgcaatgttttcatagccttcagaccgtaaatactcataaccgtccatgacgtctttccaccaatcttcaggtcccgtatgtaccagctcttccggcggaacgccgtgccctttatattgaggcgcgtgacaagtgtagccgcgctcattcaagtagcggccgagcattctgacgtctgccgtatttcccgtaaatccgtgcagcagaagcaccgctttgtctccgcctttaaatgtaaatggttttggtgtcacaattttcatgctcataaccccttttttgcacattcaatttagttttccacagttttgcgagaaacaaacgccgtctctcaacaagaaaaaggcctgatattaaatcagaccttatacaaacattgccttatacgatatacgctagcgaaatcgtcaacacgaaaaacaagactgccagcacaacggttgtgcggtgaagaatcagatcaaggccccttgctttctgttttccgaaaagctgctccgccccgcctgaaattgcacccgataaaccggcgcttttgctggtttgaagcaatacgacaataataagtgcaatactgacgataaccaataaggtaatcaataatgtgtgcatcccatacacctccagactgactggcctacattgcttctattttacatgaaaaacaaaggcatgtcacgccgtatcggtgtacatcatgtcagaaaaacggaaatgcgtttgaatcttccatcttcattgacttttgtcaacaaagtcgtagtaaaaaagatcttcaaatttcatgtcaaagtaatagagcatttttccgatgaccagctggcccggccttcgctctccattcagtacacggctcagtgtggcgggagatattccgatctccagggcgagctggtttaacgagtagtcattattgaccatatactgcagcacataatctcttctgatctgtatcttttcgaccactttcttcaccttccgttctgtcaaatactttctttcttatacataagatacggcttttgttaacttttgtcaatacttttccagcctggctattccctttagtcaataaacatactagaatataaatagaccgcgggagggggagagactgtggaaagcttcgggaaacaattgcggacattacgggaaaaaaggcatctgacagtgaatcagctggcaacgtattcaggcgtcagcgccgcgggaatctcgcggattgaaaacggcaaacgcggagtgccgaaacctgcaaccattaaaaagctcgcagatgcgttaaaaatcccgtatgaggaactgatgcagacggcgggatacatagagaccgtccaggaaacgagagccccgtacgacacgggctgcaccttgctggaaaaagccgaaacgtatgagctgcatgatttatcccttttggagcgggagaactggcggcacctgtcgaaagaagacttggttctgcttgataaatactttgcgttcttatcggcggaagccaaaaaaagaacaaatgaagactcatgactttgcacatgtgaggcgatcttattgaacacattcggaaagcaattaagagagctgcgccgcgcccggaagcttaccgtcaatcagcttgccgtctattccggcgtcagctcggcgaccatttccagaattgaaaacgggcaccgcggcattcctaaacccgcgaccatcagaaaattggcggacacattaaaaatcccgtacgaggagttaatggcgcgggccggacacatcaaggcatttcaggaggaaatccgtgaaacctccgaaagctatcaatccatctgcgccatctatcagaccgccgttgacagaggcgcggagcatctgccgctgtttgacagcaaaaagtggcagcacttcacaaaagaagatattgaaagcgtcagcaaatactttgattttattgcggctgaagcgaaaaaacgctccccggattcctcatcctctttttgatcctctcctcaacttaacaagcgccagacgtacgttccctccgattttgcggtataatagcagaagacgaggtgaaaaagcatgaaccaatcagaaatgtgccccagattcgaaaaagcggtcgacatcctaagtaaacgctgggtggctctaatcgtctttcagttattgaacggacagcagcgatttagcgaaattgaagcggcgcttccgaatttaagcggaagagtcttgtcagaacgtctgaaagaacttgaaacagaaggtgtcatcaaacgggatgttatccccgaaacgcctgtccgcattgagtattctttaacggaaaaaggctgcgcattagcccctattttagaggaaatttccaagtggtcttcaacatggattgatccttcctgataaactcttttccgcataagcggctgatctctcaaacggacagccgtttttatttttgcttttcttatacagaaaaacaagccctcaggcgtgcagggcttgtttttgtctgacgccttccagcggaattcgaatctccgcccgggctcctccagactcctgattttcaagtattaattcgccgtgatgaagatgtacgacgtgatgggcgaatgtaagccccatgccgtgatgccccgccgaatgtctgcttttatcctccgtgtaaaaaagctgtgtcgctcttttcagcgcctccggcgagaacccgcttccgctgtcggatacggcaagatggagggcggaatcggtgcacaggacgtccacacggatttcccctccttccggcgtatagtcgacggcatttgccgcgatattcatgaccgccctgtggagcagctcatgatcgatcggcgcttctattcggtcaattccccgttcgctgaggacgagatccatctgcttcggccccgcaagcgccgccgcgtcacgatatatgttttgaatccactctttgaggtcggtatattcgacatgaacggcaactgcctcctctgctttggaaagctggatcagctgtccgacataatgctcgattttgtttccggcatccaggatatactgcgcatattccgcctgctcctcatcaggttctgttaactggagcagctcggcatttcctttaatgatcgttgccggaattttaatatcatgcgcaagcgcgccgatctgttctttctttatccgctccgcctcccactgcgccgccagagatgcctgaagcgcgtctttcattttcagcagagagtcaatgacatcgtcaaattcttttatacgcgacctttttggattgatatttaaattctgtttttgaatgcttgccgtaatggagctgagtgtgctgaaatgccgtctcagctgattggcgaaacgcgtcgtcacgataaaaacagtcaaaagaagcaaagtgatcagaatcgtaagacccgtccattcataattcggcagatagcgccttaacagcggcgactgaaattccgacctgagtgaatattggagaacgccgtattcatctttccgatttatcaccatgaatcctttttgagcataattaaaatacggcgtatgctgaatcttttttctggcgttggccgcatcttgttccgtcatcgttccttttgtcatccgctttgtttttttatcaaaaacggcgtatgtcatacctgcggggatcatgtcttctgttatcttttccgctgatttcaggcggggtttgatctgttccgcctcatgctcgctgtagtttgcgggcaggatcgctccggcattcatggcaatggcatttaaggcgacgcataatgccgccacccccatcgtgctcagacacaaagtgatggtaaatttgacaagctctttgcggatgctggattttccttttgctattcccatttgtatccgacaccccacaccgttttgatcggatcagccccgtgttctttacattttttccggatggttctgataaactccgtaatggttgaatagagcgcatcgccgtccaagccgtacacttcctcgtaaatctgctcccgtgagaatgttctgtttttatgctgtgccagaaattcaacgattttatattcgtttttcgtaagaggcagtttccggtcatccatccatacttctttattgtcaaaatcaaacatgaagcctgatatcagccgtttcgtctgatgcttttcccgccgttcccttctgacatgcgcgtttacccttgccatcaattcctgtacgccgaacggctttgtgatgtaatcatcagcgcctgtcatgaggcctttcacaatggattcttcgtcagactttgccgttaaaaacaggatcgggctgtccaccagcggccgaatccgccggcagagttcaatcccgtccgttccgggcatcatgacatcaagaagaatcaaatcatagccttgaaaaaaatccaatgactgatcttccgctttttccagaatcgttactgtatgctgatcacgctgtaaaatgtttctgatcagaacgagaatatctttttcatcatcaattgctaaaatgtttgccaccggccgaatcgctccttgcctttattcatatgaacgccgcccttcccatcttctgcaccaatagaggccggccagacataatatcactatagaaaaatataacattatttctccgaatctcatatcgtatcttacataagggaggaactcttttttgactttgtcaaaatgcagcagtcctgcaaggcctgaaagcctcacgctccatgcccacggaaaaaaacgccagatgatatcgccaagtcccgtattcatgagcgccgccattaataatcccgcaccccctaaaagcccggacggtcccatgccgtactttatgccgacaaaaaaagacatcatataaagcggaatactgccggcaatcagccacgcccctccttttaaaaagagaagatacgggagatcattgatgtgaagaacaaatttcaaccccgccaaataaagacagatggcgagaccaaccgataacacattcaataggagcagcagaagcagcttgcccgcaaaactgacgattttagaatacggaaccgccagcatcatctgaaaatggcccgcctgttcctcgacagaggcagacatgccgcagacaatactgatgatcagagggtataaaacggcaatcgcgctgaaaaagacgctgtacagcatataagactcctgaacccttccatacatatataacaggaaaaatcccgcgcataaaaccggcgccgcagcatgcatccatatgagcggcgtgcgcttcatttttaatacatcggcccacatatatcgtaaaagcacggtcatgaccggtttcctccttttgaaaatgacactgcggaaacaaaacttattgcgataaaagaaagaatagaaagaataatagccggaatgatcacgtttccgtttaataagccgctgtttgcgggaagcggaattccgttcgggtggattccgagaatcggtgacatcagccggactgaccagctccacggactcagccaccacaatgaaccggacgccggcacaatgcctaaaacaaaggcggcgatcatattgatgagaatgactgccgtaaatccgaactgtctggcaatccataagcacaatgggatttcccaaagcgtcgtcagccacaaaagggagcttgcttcaacgcctttcagctgcagcgcagcaattgccggaaacacaaggccaagcaaaaacacgatgactaaaaagacgatttgcgacaggagtgaatacagcgcgatcaaacttatttttgagaaccatatgctttttaaatctgccggcaatgagtacaccgcgcggtcattcgctgattttttctcttttttaacagataaaccgcacattagagcaatcatgagcggcatgaaaataaccgcccaccaattgaacgtgcccgtcataaaataggccgcattcagcagaaaagaaaaagccgcgttcagaagcggaatcagaatgatcagctttctgataaatgttcttttagatgtaaggtgttccgcctgcatgtactgaatcattttcctgtccccgctttctcccgtgttgatttgacaacctccagaaacagccgctccagatcgtcttcccggctgatttctccctgatatcctaaaacgccgtcactgatgattccgatatggtctgcgatctgctccacttctgataacaggtggcttgataaaatcaccgtcattccctgtccgggcagggagcggataaattcccgcaaatcctgaatccccatcgggtccaatccgtttgtcggctcgtcaagaattaagagcgacggacggtttaataatgccaacgcgatgccgagacgctgtttcattcccatggaaaattgtccggcgcgcttttttccggttcccgttaatcccgtaatttccagcacctccgcaattcttgaatcaggcagtccgagcatcacgcagcggactttcagattttcagcggctgtcaggttgctgtaaagcggcggtgcttcaatcagggaaccgatgcttttcaaatcttcgcgcttccatgtatgtccctcgaacagaacctcgccggatgtttgctgcagcatgccggtcaatattttgagagtcgtcgattttcccgcgccgttcggaccgagcaggccgtatatactgttgcgcttaaccgatagagacacatcagccactgcctgttgtctgccgaatgatttttgcagctgtctcgtttctatgatgttgctcatatgattacccctctgctttgttatttgatatgtaagactttacagcgcagttatcaaaatttaatcaagaaatcaaaaaaagcatccttcacgcggaagaatgctttttttcatgaggctgagcgtacgatcagctttcttttttgttttttcacagggctgagggctcgttccagccacgccatcagcaggtctgcggccaccgccatcagcgcggtcggaatggcgcccgccagaataatggcggttccgtttgtcgcgttcgagcctctgacgatcatatccccgagaccgcctgcgccgacgaaagtgccgatcgctgtgatgccgatggcaatgacgagcgccgttcggagacccgccataatgacggaaagcgcaagcggcagctccaccatacgaaggatttggtatttcgtcatgcccatcgcttttcccgactcgagataagcgtgctcgatattgataatgcccgtgtgcgtatttctgagaatcggcagcagtgaatacaaaaacaaagccgtgatgaccgtattggcgccgagccccatgacaagcatcaggacggcgagcatcgcaagcgccggaacggtttgaatcacgttcgccacagcaaacacccagccggcgagacgcccgtgcctggctgtcacaattccggccggaatggcgaaaacggcggcgaaaacgacgccgtacgccgacatgagaaagtgccgccagcactcatacagaacatagctgccgttttgagcgtaatacgtaaacaactctttcatcgtgtccatccgcacatctcctttccgttattcaaagtaatgatgtttttctaaatattccttggccacgacggacggctcttttaatcggccgtcaacttcgtaattcattttctgcatcatctttgtatcaatcgcgccgatcattttattgatcacgccctccagttcgggatgctcttttaatacatgatccggaacgacgggtgaacagtcatacggaggaaagaaccgcttatcatccttcagcgttttcagtccgtaagcgatgattcttccgtcggtggaataagcgagcgcgatatccatctttctgcttttcagcgcgtcgtatacgaggccgatctgcattggatacgtgccttcaaatgacattccgtatgttttcataaaatcctgatatccgttgcctctcagcttcatccaatagttatctacgccgaatttcagatgggatgcttcttttttgacatcggataccgtttctaaatggtacttgctggcaagctgtccggaaacggtaaagacgtatgtattatcaaagccgtaagaatcaaaccatttcatgtcatatctgttttgaaattcacgctgaacgagccgcagcgctttgtccgggtctttttccggctccatgcgaagcgtcccggtcagcgcgtctcctgtatagcgcgtcgcggcgatatcaatatcaccgttgatcaaggattgctgctgtacggcgttggagccgagatttttaataacggatgttttcaacccgctgtgatgttcgatcatctgtccgagcatgcttgcgatgatttccgattcggtcatgctttgcgcgccgattttaatggtgtcctccgatgcggcgctcaatcccgggagcgagcatccgccaaggagcagcatgccgagacaggcgattgcgagcagccgttttttgcatctattccccatgtgagacctcctccttataaagcgtcctttatgcttttcagcccgtcaggcgtgactttccgttctgtcacccccagcatgtaatcgacggcggccgccagcatcgtgaccggaacggcgcctgcgataatatactccggctgataaaggttcaagccgataaaaatgtaatctcccagcccgcctccgccgataaaggaggcgagcgtcgcccagccgattaaataaatcgaagacgtcctgatgcccgccatgatgaccggggcggcaagcgggagctctacaagcctgatctgctcccatgccgtcatgccgattccttttcccgattccagaaggtgccgattgacgccgagaatccccgtatacgtgtttctgagaatcggcagcatggaatagaaaaacagcgccgcaacggccgggacctttcctacgcctaaaagcggaataaaaaacgcaagaatggcaaggctcggcaaggtttgaatgatgttgacgatgccgatgacggcgccggctcctcttttcatcctcgtcagcaggacgccgagcggaacggcggcgagaatgcccgccatgacggcgattaatgagatgtacagatgctcccatgttttataaagcatctctcctccatttgcctgtaaaaattgtacggtctgattcatatcaattgaagcctcctcatgacatcaccgcgagctgattctcttctccccagatggagtcatagacgatgtcaacgaggcttgcccttgtcacgattcccgttagccggccgtcctcatcaaggaccggcacaaatttcacgcctctttttaaaattttatggacggcgtcgcgaagcagagtgccgcttctgaccgtgtacagatcccgttcaagcacttccgcgacggttaccgcttgtcttcgtttgcggtcaatcatctccacatcgacataaccttggagaacgttcttttcatcaatgacgagcagcgaatccacccgctcggcacgcatcagctgaatggcggctgacagtgttttctcaggtgttaccgtcacgggatcgggattcatgatctgctccacccgttcaatatcagggctggatgattgaatcagccgttccttgccgataaactcctcaacaaattcattcgccggaaatctgagaatctcatcaggcgttccggcctggacgatttctcccgctttcagaatgacgattctgtctgcaagcttgatggcttcgtccatatcatgggtaacaaatacgatggttttatgtaaggttttttgcagttttttaaattcttcctgaagggaatctctcgtaatcgggtcaagcgccccgaacggttcatccattaagataagcggcggctctgcggcaagtgcccgtaatacacctattcgctgctgctgtcctccgctcagttcatgagggtaacggtctaaatattcaggccccatatcaacgagctttaaaagctcccgcgcccgttccttccgtttttcggcagaatgctttaaaagcttcggaacgagcgtaatgttctgctgaatggtcatatgcggaaacagcccgatctgctggatgacatagccgatgcttcttctgagttccaccgggtcttgttccataatgtttcggccctctatcaggattctgccttctgtcggttcaattaagcggttgatcattttcatcgtcgtcgttttgccgcagccgctcggtccgataaaacaaataaattcgcctttgtcgatattcaggttgatgctgttgacggcttttttcccgcctttatacgttttcgagacattttctaatgtcagcaaacactcacacctccgatattaaatttgttcaaatcgttaaattcaaatttaacttttcagacaattgaacgtttcccattataaattaaactttgtaaattaaaaagtttacaatttgtccatattatatataaaggttgtgtaagcactgatttacccgtattgaccggcaaagttcttcttattgctccgaattactgccaaattctctcggaagagcatttccgccggtttaaaaatgtggtatattgacatcggaattgctgactgaaaggattgaaactgttggagaaagatccgttacacgtaatcgaacaagctgaagatcatttgatagaacgaatcgctgaaaatatgcatacattcggaatgcccgcgacggtggggcgcattttaggcattatttatatgaaccgcaagccgatgaccttaactgaattatcagaagcgaccggcatgagcaaaacgagaatgagccaggcggtccgtgaaatgcttgacgtcaatctggcggaaaaagtgtttgaaaaaggcgtccgcaaagatttatacgacgtcgagcaggattactaccaaacctttattacgctgtttacggccacatggagcaaggtcgtcagcaaaaataaaatgatgcataaaaaactgaaccgcgaactgacggccgtccttgaaaacggcgtgccggaagaagctgaggaaaaaatcaacgaactgctgaaagaattaaaggattggcttgattactacaactggatcagccgtctgatcgagttttttgaaagcgaagaaatattcaagcatgttccgaagccataagaaaaaaaacgccctgacccgcaaggcgtttttttcatgccgcattcggcgctttggttcgttttttctttctcaccggactcagcgcccgctccagccatgccatcacaagatctgcgataacggccatcagcgctgtcggaatggcgccggctaaaataatcgctgttccgttcgtggcgtttgagcccctgacaatgatgtcaccgagtccgcccgcgccgacaaacgttccgattgccgtaatgccgatcgcgatgacaagggccgtccgcagccccgccatgatgacggaaagcgcaagcggcagttccaccatgcggagcacctgaaatttggtcatgcccatcgcttttcccgattcaagataagcgtgttcaatgctggcgattcctgtgtacgtattccggatgatcggaagaagcgaatataaaaacagcgacaaaatcaccgtattggcgccgagccccatgacgagcatcagcaccgcaagcatcgcaagcgccggcacggtctgaatcacgtttgtcaccgcgaatacccagccgcttaatgttctgtacctggcaatgaagatgccgagcgggacacctacgatcgccgcaaataaaacgccgtataccgacatgagaaaatggcggtaaaactcctgaagcacataggccccgttttgagaataataagtgccgagctgctgcagcacttccatttgccccacctcatttcttattcaaaataatgatgtttctccaaaaattctttagcgacgacggacggttctttcagcttgccgtccacctcgtaattcaattcctgcatcgtttccgtatcgattttgccgatcagtttattcacaatgcccttcagttcaggatgctgcttcagcacgctgtcgggaatgaccggcgaacagtcatacggcgggaaaaactgcttgtcgtcttttaaaattttcagatcgtacgctttaatccgtccgtccgttgaataagcgaggacggcgtccattttcccgtttttcacggcatcgtatacaagtccgatctgcatcggataggttgtgccgaattcaaaaccgtacgtgtcggtgaagcccttatagccgtcgccttttcttttcagccacgcattgtctacaccgagcttaaattgatccgcatgcttcttaatatcggatactttgtctaaatgatctttttccgcaagctctttcgtgacggtaaaagcgtatgtgttctcaaatccgtaagaatcaaaccatttgtaatggaagcgtttctcaaattccttctggacgatagataatgcttttttcgggtctttttccgcttccatgccgagggtgctcgttaaatccgttcccgagtagcgcgtcgcggcgatatcgatttcaccgccgagcatcgcctgctgctggacatagttcgatccgaggtttttaattaatgccgtattcaagtctgtattgtgctcaatcatctgtgcgagcatattggcgataatttctgattccgtcatgctttgcgccccgattttaatcgtatcatcggaagccccgctcaggccgggaagggaacagccgcccagaagcagagcagctgacagcgccagtgcgcacatccatctcttttggtttcttttcaaaacagccaactccttatgatacttccttcagtcctttcagccctttcggcgtcaccttccgttccgtcgccgccagcagataatcaatgataatggctaaaatggtgacgggcacggcgccgccgataatatattcaggctgatagagattcaggccgataaaaatatagtctccgagcccgccgcccccgataaaggaagcaagcgtcgcccagccgatcagataaatggtggatgtgcggatgcccgccataatcaccggaaccgcaagcggcagttccacaagcctgatctgctcccagaccgtcatcccgatgccttttcccgattccagcagatttttgtttacgccttgaatgccggtatacgtgtttcggagaatcggcagcaccgaatagaaaaacagcgcgacgatcgcgggcacctttcccacgcctaacagcgggataaaaaacgccagtatcgcgagactcggcaaggtctgcacaatgttgacggcgccgatgacggcgcctgcgccctttttcattctcgtcagcgccactccgagcggaacggcgacgacaatgcctaatatgacggcgatgatcgaaatgtataaatgctcccacgttttatataacagttctccgccgttcgtctgcaaaaacttgatcatttcattcattgtaagcgttcctccccttgtcagcctgtcaccagctggtcttcctcgccccagattgaatcgtaaacgatgtcgacaaggctcgcccgcgtgacaattccgactaaatgcctttgttcatcaacgacgggtacatatttcattccgcgctttaaaattttgcgtacggtatcacgcagcagtgtaccctgctcgaccgtatacagatcagagcggagcacgtcgccgacgaggctcgcttttttccggttctgatcaatgatctcgacatcgacatacccttgcagcacattcaggtcatcaacgacaagcagggaatcgacacggtgctcccgcatcacttggatcgcctgcgaaagtgttttgtccgccgtaacggtgacaggctttttgttcatcatctgctcgacgcgctcaatgtccggtcttgattgcaataaccgttctttgccgataaattcttcgacaaactcattagccggattccggagaatgtcatcaggagtgccggcctgaacgatctctcccgcttttaaaatgacgatccggtcagccagcttaatcgcttcatccatatcgtgggttacaaacacaatcgttttattcaatgttctttgcagttttttgaattcttcctgaagggaatcccgtgtaatcgggtcaagcgctccgaacggttcatccataagaataagaggcggttccgccgcaagggcgcgcagcacgccgattctctgctgctgtcccccgctcagctcgtgaggatagcggtctaaatattccgggcccatatcgacgagcttcaaaagctcccgcgcccgttccttccgcttttgttccggccatttcagcagtttcggcacgagagaaatgttctgctgaatggtcatatgagggaaaagtccgatctgctgaatgacgtagccgattttccgtctcagctccaccgggtcctgctccataatgttttcgccatcgataaaaatctttccggatgacggctcaatcagtctgttaatcattttcatcgtcgtcgtttttccgcagccgctcggcccgataaaacaaataaactcgcctttttcgatatttaaatcaatgctgttgacagctttttttccgcctttatagactttcgatacattttctaatctcagcaatccgtgcacctccgaagggttccgttatttttctgaaaagtataatctttattataagatgaaatttgtaaaataaaaagtttacaatgtgttgaaattatatacaatatacgtattttttcatgttatcccgctgacaatgcggatgttcttacaatcgctcccgatagctcgcatatcctgccgcatcatctttttcatcaactgtaaaaaatatgatatattgtcagcatgaaaagccagtgaagggatgatcagccgtggaaaaaaacgctcttgatatcatcgggcatgctgaagagcatctcattgagagaatcgccgagaatatgcatacattcggaatgccggccacacttggtcgtgtgctcggtattatttatatgaaccgcaagccgatgacgttaaatgagctgtcagaggcaaccgggatgagcaaaacgaggatgagccaggtggtccgtgaaatgactgatgccaatctggcggaaaaagtgtttgaaaaaggcgttcgcaaagacctttacgacgtggagcgtgattattaccagacgtttatctccctgtttacggcaaattggacaaaggcggtcagcaaaaacaaaatgctctataaaaagctgaaccgcgagctgactgagcttctggaatcggaaaatctcagtcccgatattgaagaaaaagcccgtcagcttttggatgaactgacggattggctccattattatgactggctgagccgtttgatagaattttttgagagtgaagaagtgtttcagcatgtgccgaaaatagaaaaaagcagcccccgaagataaccgggcgctgcttttttaagtcaggaaaccaatatcgggaacatgcctttcagaccggcgccgatcatgccgatcgccaccaccgccaaaatcagccccatcagtcgggtaatgacgttcatttcggttttcccgagcttattgctgatgaaagaagaatagtgaaagaagatgaacgtcatcgcgatgacggccgcaatgccgataagcacgctgatgtaatggatgatgccgccatggccggccgacagactcatcaccgtcgcgatcgtaccgggtccggcgataatcggaatcgacaaaggcgtcacggatatatcggctttctccttgctctcccctttctcttcatgatggagagactgtacatgagatttcttcgcgttcagaagattataagcgatgccgaaaataaaaatgccgcccgcgatacgcaaggcatgaatgttaatgtcgaacagtttaaagatcagatggccgaaaattaaaaaagcagccaagatgataaacgacagcacggaagccttgcgtgcgatcgctgtccgttctttctccgggtatccttccgtcagtgaaagaaaaatcggcacgtttccgatgggattggagactgcaaacagtgaaatgaagacatgaatgatgaatgaaaacatgcgtacctccttatgacttgccgttattgagttatgttttgttctccgctgtttcttatgcatgatttttaccccggggtctgctttttataacctcagccggacgatccggaaaacagaaaaaaaccgtccttgtaaggacggtttttttctgtttgctatctccataagccttttccgaatttcaacagccgataaagcattttcaatttttttagcatgcgttaatttcctttttcactctgaatcaatgcgccgagagacatgatatctatcagctccaataaaattctaccataatgggtactttttctctattatcaattcatagagaaggtgatttatatatctttagaaaactccgttacatccgtcctattttcttttataatgtaaatattgaacaaaatccctatattacttgtaaaaggagttttagaatgtattgttctcaatgcggccatcatactgatggcggaaaattttgtgaaaaatgcggtgcgccccagcccgggcagggaggcgcaggccaaacacagggtcaggccgctcaggccggcgccgcggctaagcaggcttcaaagcaatttgccttattcgtgcttgatgtgttaaagagaccgtatcaaacatgtaaaacgacaggcggcgaacagcttgtcagcagcatcatcaacatggtgcttttctgcctggtgacgccgattatgttttatattctcttatcagacggctttcgtgacgtcagttttaccgcggttgtgatcaaaccggcgcttacctttgcattatgcgttttctgcctgtatctcttgatttttatcgctttgaaggccggcggcgcgcaggtgtcatttaaagattcgctgtccagattcggagcatttttgattccgtttacagctattttgcttcttgccctcatttttatgctgcttcatacaaccgtttgctttaccattctggctgtcggtcttttaggagcggcgtttgccgtgcctccgctcatgctggcgagctatcagcatcagctcactgctaaggcggatatcatttattctgttatcgtcatctatttgatcatttgcgtaacgtttcaattcacgatcaagcattatatgaaagaactcatgaattatttcttcttttaaaaacggaaacccccgccgcctgattggcgcgggggtttttttattgaatggatgttaaataaattcttccgtctttgacaacgccgccatacgtccaattgtatgttctgagcttcggactgccgccggctttcgtaatataaaactcctcgtacgtatgaatcgtcagatgagagcctttctgtgaaaagcttttgacattcactttattaaatacttcagtcgtcccctcgctgtacagttttttgaccagtttctgctgatcagcatacaaagggcttccctcttctaaattgcccgccatgatggcaaaattgttaaggctgacggcgcttgattgatttgtcaggtaatcagtcataaacgatgtgacttgctcgtttgtcacgctgcctgaagctgtatttcctttggaagatgcccatgcggatgtataggttttcggctggtcgttttttattttttttacatttgtcccagaagaatctgaggctggatcagctttttcaaaaacccattttttatgttttgtatcatatgagagtacataatgaaagctcggctcagcctcttccatatcaggcttcgtattcccgtcgaaataagcagactcatgaagctctttacccgtaacagttacttgccagcggccgttctcttgagaaatcgcaaatgaatccagatcaaagcttgtctctttatactgatctttcaaaaaggtgccggaactcttcatgccggataccacttctttcgtctgctctttccaggcggaaccagcctcggtcatctgatcggtatttccgtctgccatcgcttttgtatactgcttcgttgttttgacaatcgtgtccatgattgtttgttgtgtatcttgatccgggataagcgttaattccatatcagtaccgttgatcggaacatcggcagttttcatttttccccaaggaaaatcagcctccacggcggctgtcatggaaccgtcagttaagagcggaccgtatgtaacggatgtaaacggatctttatggacggacttgccgtttatcagcagatcgcctttcgcgcttttgaagctgtctgccggagtgaacgtcacatcctcggcgtctaacggcagatcaaaatcaacattccggctgccggccgcctctgcctcttgctttttgacaacgtcaaccgtgtcatttttaagcttggcttccgccgtgtagacaccgggtgcatacgggccgaagatttgggtttcatcggcttttttgaccgtccctgttttctcgctgttgatataaagatcggcgcctttataattgctggtgacgcggaaataaaccggatcgactttcagttcgtaatggtcaaacaaaagaagggttttaccctcttttttgacgtataccgcatctttttctgatgaattgccgcgaagcgtttccagcagttcatcgtgtttctttgcgtatgcaaggagcggtttgacattggtctcattcagcttcagttttttgtctgaaggagtgagcagggctgcgagctttttcgtgtccccgtcatgaaccgcctgttcgaattgatccgtgagccttttttcagatgtcagccaggctccggttttatatgcggcaatcaataagatcagcgctgcggctatgccgccccatatgaagagcgtttttttagggatcggctttctcatttgtgaagcaggttcagccgctcttacagccgcctgccgttcaagccggcttcctttcccgatcggttttccgcattctttacagaaatgcgcctcttcgttgttctgtcggccgcaatacttacaaaaaaacatgactttcctcctattcaatctacaaaacttgtataacttttcctatgtttcatattttataataaagtagaatgattttggagttattttgaaaaatagctgtcgatcataacggaggaggagaaacggacatgcaaaaactgagcatccgaaaagccgcggatccggatgaagcgctgtatgaactattgctgctggccgatccgtcgaaagagattgtcgatgattatcttgtaagaggagaatgctatacggcttggacgtcagacgagcttgcaggggtttacgttttattgcaaacaaggcctaaaacgatagaaatcgtaaacatcgcggtaaaagaatcgctgcagaacaggggattcggaaaacagctggtgcaagatgccattgaaaaagcgagacaatcgggagctgacacgattgaaatcggcaccggaaattccagtattcatcagctgtcactctatcaaaaatgcggattccgcattcaggctgtcgaccatgatttttttatcagacattatgatgaagacatttttgaaaacggcattcaatgcctggatatgatacggctttatttggatttatgataaaaagggcgccggctgataccggcgcaccttcgtttaccattcagacggattgatccgcttgtttctctgaatttctttgactcccttgtctgactgaaaaaacagcaaaaacgatcgtaagggtcagtccgaccgccgcaaaaatataatccgcattcatcaacagcagaagccctgtgtagacagcggcagacagcggttcacccattttgacaatggaaaaaatcagtgcaaaaacccttccgaaatatgcggccggaaccgtcttttggaaatacagcaccgtttgcacatcaatatacgagatgatgatgccaagcaccaggaaaatgatgcactcaaacccgtgaagcggaaaaaacagcaccaaaatgagcagtcccgctgccgttaacgtccgcggatacagccggttcaagcgttttgtattccatttgaaaaatacggccagattgcccaaaagcatccccgcctgaaacattgaatacatgacggcaaaccatacagaatagttctgctgaaaacgttccacagcaagaatcggccccattactgaaataagaccggcaatgacgagatttacgacgaaaaagtatccgaccgatgtcagccatgccgcatttcctttcagcattctgtagccggcttttacatcttcagccccgttgcttttttcattgggctgttctgaaatacgaatgaacgcgataaatgccgcggagataaaaaaagcagttccgtttatggcaaacagcagcccgaacggaatagccgcaatcatgattccgctgatcagttttccgacgatgagtccgatcaagtcactcgtattgatcagagatgtcgcctgatcaagatgctgtttgcggacgagcagcggaatgatcgcgactttcgccggcgcaaacagcatcgattgcagagatagacaaaaggcgcacacccctgctatccacacggttaataaatcgttcgcgctgagcaccgccaagaggatcatgatgacggcccggcccgtattgcacaaatacaagatcgacttttttcggaataaatcaatcagcggtcccgccagcacgccaaatgtcaacggcacgagttcgataaaagaaataacgccgacaagaattttactgccggtcaattccagcactaacagcggcagtgcaataagccagataccgtccgccgctgaagaaaacacctgcgcacaccaaagctttgcatagttcggtgttcgatatgtcatatcaggcccttttttgatcctcggcatcagaaacaccgccgaaccattccagcgttctccatgattcccgtctttccgtataatcctcttccatcacctcaaatacaatgccggtatcttgattccgataaagctcctgcaaagtatcggcagcccgtctcagcagctcctcagcgatcgtcccttcactcggatggcggccctcaaaacagcggacgccgccatgcgggaacgcaagctggcgaaatgagctgaagtgataatgtttaatgctctcttttatcgagagaaactgaaagaaatccgggtatctcagctggtcatttctgaacataagcgcggaagacaagtgagtctgataggtaatcgcccaatggcacagatcccacgtaataccgacatgcttcagatccagctgaaccagctctgtaaaatcctcaggataaatgaaaatcggatcaaaatcctctcccagattcccgatgatcggaaggttttccacaccgatccaaatgtccgtccctttcagctgctcatcaaactctgcgaaaaactcaatgatttttttacggtttccttccaggtcatacacttgaaattcctcaaccgtcataaattgattcgcatgaacggttatgcctttggcgccgtatttcacagcgagctccgcaaagtgataaagctgttttttgatgtgatcttcatgcacataatcggcatgatctgtcgggaaatgcagcgtcaataatgaaggatcaagctgttttgcatattccagcgtctgattgaatgttttgagataatccgcttcactaaaggagcggccgtcaaaaatattcgcttccagaccgtatcccgcttccacccatttctcatcgatttgcttcggatcaagtccgaaaaacggaatttgagcaatcataggacagtcaccatgttcctctcacaagcataaacgcttccgcagcggaaaaacccgattttgctccccatacacgggcattatgttcgattgcctgcaaagagcggggatgagggaagtctctgagctcggagccgtaacacgccatcgatttcaattttgtttcaagctcgtcttcaatattaacgaagaaattggcatgaaactgatccttctgacagtaattccattccgtcgaagacaatgtttcataggcaaaaacccgttttaccgtatggccgggaagcggacgggttgcggtcatgaccgctctgaatacgacggagtggtcaatattaatgtcaccgccgtactgggtatacacaatgtcaggctgaaaacgattgatttgtttctccgcttccttcacgacatccagcaaatccattgaatccattctgttatcaggaaggttcagcctgacaaaatcatggatgcccaaagtgctgagcgcttgttccgtttcttgagcagaatgctgcataacagactcttcaggcttctcataatccgtttttcttgatgacttgccttccgccataatgactgccgacacgctgtcaccttggcggacatgtttggcgagcgtgccgccgacgccgataatttcatcgtcgggatgcgctgcaaataccattactttcatcatattgccctcctttaactaacatttcagctgtatccgctccgcagttcatcagcatatcaagcatggagaggtgagggatatgctccccgaataattgaggatagtcaaaatgccggatctgctgatactcaatgacaattccgtttctttcaaaatcgctttctattaaatagtcggaaccctgactgcctgaataataacgatccgcccccagctcctgacaaagcgctaaaacaaaatcgctttttttctccttccggcattcaagctcagagacataacagagcggcgtttcgattcggagctcttttcggaaaaattcaatgatgtgcatattcaaatcatggagatattcccactccctctgatagacatcttgaaaaaaatgctggtaccgctcaaaatagggagctttcgcatagttcatcttaatcgccatccaatgttttttccgccaatcctgtgtctggtcgattttcatatgccgaagctctatgtctttatattgtttcatctgcaaaggcaccgtcagccatctggggccctgcggcgttttgattctgttgcggttcagaaacccttttttctcaaattgagccgtgtcatgaatggcaaacagatccgacttatacattttttcaaaaaaaccgtaccacggcagataactggattgatggccgcttattgttttcattccggtttcgtaaaaagtcggcattgtttttcttcagctccccaatatcgtttcggtcttgcgatttctttactgtgtgaatagccaaaatcagcccattgaagcttgcggcaaatggcgaattgcaaagcgtcacgcatcaacaagtaagaggcctgcgctttttttcccgccaggctgtttacattctgccaataatagaaatgagagcggtcatagagaaaaatactgctgctgatcagcgtctcatcctgatatgctccgacccaaaacatccggtccccaaacgtgtcaagcagtttttggaaaaatccttggctcagcacataagcagcgccgattgccgccgtatgctccttgtagaggtcgtaaaatgattcaagttcttgtcgcccgatcagcctggtgacaatattctctttttcagcgtatctgactgccgtccgggcttttccggaaatgcccgtccaaagttcgtcaaacgtgtccggaagcgtaagaatccgtgtcgccttttccgtccacccttccccgatttcttctgtaaaagaagtctgaccgtacggcagcagcatccgggatatgttccggccgaatatggcctcgatttcactttgaagccattcaaatgagatggggcgatctgaaataacgccgccgtatccgatcatattgccggataatacgcccttctgttcaaaaagcggaagatagatgacctgtcctccgtccgttgtcagtctgacagggtgaaatgacgtgccgggaagctcttccatgagaattccccaatcatagctttgaaacaaccccgcctgatacatgtcagcggcccgatcccatgcctggcggctcgtgcatactgctgttttttgcattgttatcaccactattcagtcttattcttttgctcacaatatgataaaacggattcggctatatatctgacttgctccttttgaagaggaggtttaaacggcagagaaagaactcttttccaaagcggatcttccccttcttccgccgcatatgtttcataaatcggaatacgtccgaggggaagatagttccagcatgtttggatgcctctttcagctaaataaacggaacacccgtaccgctcttcatcccgggggaatacaatcgttaaataattcagatgttctccttcttggggctggatcatctttatgccgtacgtctcttccgcctttataaagatttctcccgccgcttgtaagtttcggagcgaagctgttacaagctgatccataagtgaaagctgatcttcaataatggcttcccttgccggatgcatgcgaagcaccggtacaacagccggtttatccggcagagcttcgagcttagtggctttcatggaaggcatgatgcccgctttcctataaatatatgaaacgggatgatgccgtttccgtttcataacagcctgtattctttgatttctgatataaattcgatagtcagctgccacttggctgcgctgttccatcgggaaatttgctttttgccgaagccattctttcggcgcgattaacgcgccgcctccgatactcgcaagcggttttgacgggccgaagcttaaaacaccgaaatcgcccagaccgccggcatatgtatccgcttgttttgtaaacatggcttgagcggcatcatcaatgacaaaaataccgtgttccttcgcccagtcaatgatggcggtattttctctccggccgtatacgtgcgtgaggataaccgcacacgtctgccgcgtcgctctttttttgacatcctcaaacgataaagaaagatgctcatccagctgcgcaaaaacaggcgttgcaccggattgcaatacggcatcaatgacattcgggcagctgaaggatgagaaaatcacttctttccccggcccggctcccgaataagttaaggcgagcaccagtgccgcactgccgctggaggtcagcacaaccccttttccgtaccgtttttccagtttttcagtcagtccgctttgtccgccagtaagcaagtgcttcaccgcgcgcagacggtccctgacggaaagctgtccgggataaacgggatatttgactacttccgggttttcaggaaagtgaaagtttgtgcttttgtctttcatcttttatgatctccaggccttcattcagacttacttttggatcgtaaccgagtaaacgtttcgccttctcgattgacggcgcccgtttaaaaatctcgatgtcttttcccctcacgccgtcttcgcccagctttttaaacagatagttatccttctctctgccagagagcacattgactttttcagccagttcttttatcgtgatcggctggtcgttcccgatattaaagtcttcaaagacggctccttcatgaatgagcgcgagataagttccggtgacgatatcactgatgtagctgaagcagcgtatttgtccgccgtccccgtaaagaggcagctcagagccattctcggccaggctgaaaaacttgttgatgacaaaatcctcgcgctgtttcggcccgtatacattaaagtaccggacgacccgaatatgaagcttgtcggaagcctgttctctcaaatattcctctgattgcagtttggcttttccgtaagccgatttcggaagctttctgcttgtctcggtataaggaaaatcaggtgaatctccgaatacttctgagctcgatgagaaaagaagtgttctgattcccaattcaccgcatacctcggtgacatttttcgttccttcaaaattaacccgtatgacgtcttcttcattgcttcggcagctgtctacaccgaccattgccgccaaatggacaaccgcatccgctccccgcagtgattcgcggagggacgtccgatcaaggatatccgtttggcggtattcagtgtcaaaagccggctccttttggtctgcaataatggtgtgataacctttagcctgtaataatgccgccaattcgcttccgataaaaccggctcctccgataatcgcaatatgtttcatgatcctacctcctggctgatagtcaaaacttcttttatagacttgacaatatagctgcaatcctcatctgataactggctgtaaagaggcagtgacacgatctcccggaaaacacgttcagtaaccggcagctcggccggaaaatgtttttgatagtaaggatgcatatgcacgggaataaagtgcacgctcagcccgatctgtttttctttcattttctcaataaacagatctctgtccatgccgccgttctctcggatccgcaaaataaataaatgccatgagtgcgttatgccgttcggaatgtcagaaagcggaagcgctgctttgtcagattggcccgacagttcacgtacataaaattgagcgatctgtgcccgtttttcttgaatttcgtttgcgcgcttcaattgaaccagaccgagcgcggcctgaatatccgtcatattatatttaaagcccggcagtaacacgtcgtatctccagctgcctttttcaccgtaccggttccaggcattttttgtgatgccgtgccagccgtacagcctcgctctttctgcggcctgttcgtctttcatgacgagggctccgccttcccccgttgtaatatttttggtggcataaaagctgaagcacacggcatcgccgtgagtgccgatcatgcttccgttatattttgtaccgagcgcatgagcggcgtcttcaatcagatacaatccgttttctttacaaatggactgcaagttttccagatcagccggatagccggcaaaatgaaccgcaattaccgcttttgtgcgcggcgttattttcttcctgacatcttcaggatcggcacatagacttttctcgcatatatccgcaaacacaggaacggctccggcgtgcaggatgacattgacgctggaacagaacgtgaagctcggcacgatgacttcatcgccttctcccacaccgagcgccaataaagccatgtgtaatgcagcggttcctgaattacagctgatgacgtgttcggctccaatacattctcccagctttttttcaaaatcgattaccttcgggcctttcgaaatccagcccgactgaatcgtttcggttacgcttgcgatttcttcgtttgtcatatcaggtctgtgaaaagagataaatcgattactaatgaccgttccctcctataaagtgacaactctgcaattgtcggctgatttttccctgcatacatttcttgtgtcaaagataatcggtgaggcatccttcaaaatactgtagtcgattacatcgtgatctgtatgaatgatgatgacgtcgtactgattgatttgttcttttgtgaaagggacagattgtttgcggcttccgtcattcaagcggatctcgctgataaacggatcatgataatcaatcgcgcatcccttgtccatcaattcttccattatcgtaaacactgaggattcacgcgggtcatttgtattttttttataagcggcccctattattaagatgctgcatttgtctttgcccgccagtttcaaagcatagtcagagacagaaatcggcatgttagaattgatttcgtccgccagatcaattaattttgtctgcagccctttttcattcgcgatccatttgaagtaaaaaggatcaatcgggatacaatggcctccgactccggggccagggataaatttttgaaagccgaacggcttcgtgtccgccgcgcagatgacttcccatatatcaatatcaagttcacggcaattaagcgccatttcattgataagagctatattgacataacgataagtattctctaggagtttagctgtttcagctacttcgggtgaggtgaccgggtgaatgcttgtaacaatggtgttgtaaaacgctgaggcaagttctgtgcaagtctgtgtggttccgccgactactttaggaatatctgaaacttcatattgcctgttgcccggatcgattctttccggagaataagccgtaaaaaagtctgttcctattttcatgccgcggcttgatgccattctgtcggcaatcttttttttcgttgttccgggataggtggtgctttctaaaattaaaagctgatgctgccttccataagcgatcatgctgtcaactgcactgtcgatgtaggttaaatcggggatcttgtcttttttgttcaggggtgtcggcacacatatcacaatgatgtcgcatttttggatgagcgacatgtcggcactgatttgaaagcgttttgtttgtaaagccgagttcagtctgccgtcctctatatcttgaatatggctgcttccggcggctaacaaggaaaccttttcactgtttttgtcaaatccgatcacattgtatcctttatcgacacattccagcgcaagaggaaatcccacatatcccatgcctaacacgcctactatcgcctgcttcgtttcaatcagatgtaacagccgtttttgaccaaggttgctggcttcttttgtgacagtattcatttttcgccccctaatagatagaaaagagtattgttttttacaatttaaaacaaatatcgatcgatatcgcaattataacaaaagttaaaatttgataaatgagttttacatccttttgtgaattaggtattatctatttatttttcttttatttgtaaaataaaatcctgttaaatggtatatatctggtaacgagtgagaaaatctcccttaattgatagaatatacagaaaataatataaaaaaacaggccgaagcctgttttttattccttcattgcctcagttactgccgcggaaacgagtgctccagctttctctagccgttctttgctgatgtgtttcatattatcattttcggtgtggtaccagggccccggctcctgtgtatcggggctgagccaaatccagttagccgacggaatccccgcttcataaaaagagacatggtctgagtaaccgagctgaatcaggtttggcttgaccaaccgggatttttcagcggctttttcagcataccggacactcgggtttttcctgccgtcaggagtcgtgacacacatttgactcgcttcttcccagtcagtcgcaatcatatcggcattaaaattggcccggctgtgctttctttcattgttcgtgagtgtactgacgtaataagatgaacccgcagaccataattcttctgcaccgaacaggataaagcggatctctttgtctttcggtatatgtttgagttgcttgctgatttccagaacggcagatgtgcctgaggcgttatcatccgctccgggcgcgccttttacgctgtcataatgcgctgtgacataaataatatcagcatcagaagagttggcctgtgccgctttgcgcgttcctataatattttgtgaggtgcggtttttatagtttttaaattgaatgactgccttcttttcctgaagcaatgcttcaccgtcttcttttttcatacccgccgccggtatcgtgattcctttatcggtatgcggacggacggcgagcggttttgttgtctgattataaataatgactgctttggctcccgcttgttcggcatgtttgatcttttgagaaacagggatctttccttcgcgtatcactgcaatctttccttcggctcctgttacgtcattgcgtgatccgcagccgccgtcaaaaatcccgccttctattttgagctctttttcaacagcggattgatcagcggagcggagcgggaattcatgatctcccgctgtgactgaacctgaaaagtactttttcaatggaaatgactgtactttgacactggcgccctgagcccgcagacgattcgatatgtattcagccgcttccttttctttcgcagttccggtttcccgcggaccgatggtttcactcagatcatgcatagtgtccaatgcctcatcagcatcaaaaaccggcgcggtcacagttgaataagcatgagtttcggacagcggcccggcagacgcgccccatatgacgcttgctgccaccgcggctgacataaatgaaaatttcatcataatccctcctcttattaacacctcttccctttcgattgaagaacactgattcctttaaaaaggggaaaaatgaatattattgaccaaatgaagatgatgaaaaaggagggaaaagcccgggaccataaaaaaacgccgggagatattctcccggcgtccattacattacttatttaagttatagaaagagttgataccgtgatattgagcagtttcagccaactgatcttcgatgcgaagaagctggttgtatttcgcaacacggtccgtacgggacggagcacctgttttgatttgtcctgcattagttgccacagcgatgtcagcgattgtgctgtcttcagtttcaccggaacggtgagagataacggcagtgtagcctgcgcgtttcgccatttcgatcgcatcgaatgtttcagtcaatgtaccgatttggtttactttgatcaggatagagttgcctacgccgtttttgataccttcagcaagctttttcgtgtttgtaacgaaaaggtcgtcaccgacaagctgaacttttttgccaagacgctctgtaagaagtttgtggccttcccagtcgttctcgtcaagtccgtcttcgatagagatgattgggtatttagaaaccatttcttcgtaccagtcaaccatttcagcagatgttttcacaacgccttcgccagacagatggtatttaccgtcttctttgttgtagaactcagaagatgcagcatccatagcaagcttcacttcttcgccaggtttgaagccggctttttcgattgcttcaacgattgtttgaagcgcttcttcgttagaaccaaggttcggagcgaatccgccttcgtcacctacagctgtgttcattcctttagcagaaagaactgatttcaggctgtggaagatttgagcgcccatgcgaagcgcttcacggaagttaggcgcgcctacaggcataatcatgaattcttgaatgtctacgttgttgtcagcatgctctccgccgtttacgatgttcatcatcggtacaggaagcgtttttgagttgaatcctccaaggtattggtaaagaggaatctgtaagaaatcagcagctgcgcgcgcacaagccatagatacgccaaggattgcgttcgcaccgagtttgcctttgttttcagtaccgtcaagctcgattaaaagctgatcgattgcgttttgttcagttacgtcaaagccgagaagctctggagcaatgatttcgtttacgttgttaacagcagttaacacgccttttccaaggtaacggtctttgtcgccgtcacgaagctcaaccgcttcgtattcacctgtagaagctccgcttggcactaatgcgcggccgaaagctcctgtttctgtatatacttcaacttcaactgtcgggttgccgcgggagtcaaggacttcgcgtgcataaacatcaacaatgtatggcatgagtttgtctctccttttgatttacgcttatttttgaattaaagatgttccggtcatttctttcggtttttcaacaccgagaaggtctaataacgttggtgcgaggtcgcctaggattccgccttcgcgcagcgtcacgccttctttcgtcacaatgacagggactgggtttgtcgtatgggcagtgtgcggttcgcctgtttctgtaatcagaatgtccgcattaccgtgatcagcggtaatgatggcatgaccgcctttagcgataatggcgtcaaccacttcgcctaagcattcgtccactgcttcaattgctttaatcgtcggttcgaccattccggagtggccgaccatgtcagggtttgcaaagttcaggatgatcgcgtcgtgcttgtcagccgcgatttcttttacaagagcatccttcacttcatacgcgctcatttcaggcttcaggtcatatgtcgcgaccttcggcgagttaatgaggatgcgctcttcgcccgggaattcttcttcgcggccgccgctcataaagaacgtaacgtgcggatacttttcagtttctgcaatgcgaagctgttttaacccgtgctgtgctaatacttcaccgaccgtattgtcaaggtttaccggtttaaaagccacatatccgtcaacagattcactgaagtgagtcaggcagacgaaatacaggtttttcggatgattttcaccgcggtcgaaatcgcggaaatctttgttggtaaacgtgtttgaaatctggatggcgcggtctggtctgaaattatagaaaatcacagaatcgccgtcatgaattttcgcaatgggttcaccgttttcttttgtgatgacggacggaatgacgaattcatcatgaatgccgttcgcataagaatcgtcgactacatccatcgcgctgcggtaagacgggccttcgccgtaagccattgcgcggtacgctttttccacacggtcccagcgtttgtcgcggtccatggagtagtagcgtccggaaatgctggcgatttcgccgacaccgatttcttcgatctgctcattcagctgctgaatgtaagttttcgccgtttgcggacctacatcgcggccgtcgaggaaaccgtgaatatacaccttcgtcagtccttcacttttcgcaagtttcagcagcgcgaataaatgattgatgtgactgtgtacgcctccgtcagaaagaaggccgaacaggtgcagcgctttgtcgttgtctttcgcgtttttgatggcgtcaaggaacgtttgattgcgttcgaattcgccttcgcggatggcaacgttcacgcgtgttaagctttggtacacaatacgtccggcgccgatatttaaatgaccgacttcagagttccccatctgtccttcaggcagtccgactgcttcgcctgatgccgtcagcgtctgatgagggtattggttccaataacggtcgaaattcggttttttcgcttgtgcgactgcgtttccgactgtttcattgcgtaatccgaacccatcaagaatgatgagtgcagctggttttttactcatattgaccttcctccaataattgaacgaatgactgcggttcaaggcttgcgccgccgaccaaagcaccgtcaatatcggactctgccatatattctttaatatttgcaggttttacgctgccgccgtattgaatgcggagcttgtcagcagtttcctgactgaagctttcagcaacgactttacggatatgcgcgcagacgtcgtttgcatctttcgctgtagaagatttgcctgttccgattgcccagattggctcgtacgcaataacggaagcagcaacttgctcttcagaaagacccgcaagcccttttttcacttgatcggcaacaagatcatttgtttttccggcttcgcgctcttcaagcgtttcacctacgcaaatgatcggcacaatgccgtgtttgaaagcggcatgcgcttttttgttaactgtttcatcagtttcagcgaacatttcacggcgctcagagtggccgatgacgcagtaatccacgccaaggtctttcagagcgaccgggctgatttcacctgtgaacgcaccgttttcttcaaaatgcatgttttgggcgccgactttcaggtcagttcctttaacagcagaagtcagcttttctaagaaaagagctggtgcgcaaacaacggcttccgctttgtctgctgctggaatggaagatttcacttcttcaacgaagctgacagcttcgccgagtgttttgttcattttccagttaccggctataattggttttctcatctgttccacttccttatagcagtttttatttatcgttcagcgcagctacacccggaagctctttgccttccatgaattcaagggatgcgccgccgcctgttgagatatggctcattttgtcagcaaggccgaatttttcaacggctgccgcagagtctcctccgccgatgacagagtatgtatcgtttgcctctgccaatgcttcagccactgcttttgtgccttgagcgaacaagtcgatttcgaatacgcccataggtccgttccatacgacaagtttgctgtttttgataacttcagcgtacgtttcgcgggttttcgttccgatgtcgatcgcttctaaatcacttgggatctcagagatcggcacgatttgaacgtttgcatcgttagagaaatcatcagcaacgagaacgtcttccggcatatagaatttaacgcctttttctttcgcgcggtccatgaatgattttgcaagttcgattttatcttcttcaagaagagatttaccgacttcatagccaagcgcttttacgaatgtgtaagcaagacctccgccgatgatcaggttgtccactttatcaagcagactttcgattacgccgattttgtcttttactttcgcgccgccgatgattgccgtaaacgggcgctcaggatttgtcacggctttgccgagaacgtcaagctctttttccatcaggaatcctgcaaccgccggcagatgctcggcaattccggctgtagatgcgtgagcacggtgggcagcaccgaatgcgtcattgacatatacatccgcaagctcagcaaatgctttagcaagctcaggatcgtttttctcttcaccagggtagaaacgtacgttttccaatacaagaacgtctccgtccttcatatcagaaatttgtgcttttacagcatcgccgtaagcttcatccgcttttttcacttcttttccgagcagttcgcctaagcgtgcagcgacaggagttaaacgaagctcctcaaccacttcgcctttcgggcggcctaagtggctcgcaagaaggactttcgcgccttggtctgcaaggtgtttgattgttggaagcgcagctcggatacgagtatcgtctgttacttccccgtctttcattggaacgttaaagtcaacgcggcagaatacgactttgccttttacgtcgatgtcttttactgtttttttattcatgccttaggagatcctccttcaaaatggtttgcatagcacgaaaaacgtgaaacgtgaaaccgcctcatgatgcttccgccgcggggcagattgcagcttccgggcacggggcagatcgtcttctgagccagggcaggcggctcagaaaacgaaagtgccgcggaaacttcaaaacgcggacgttctgcagcaatccggcgctttctgaaagccggttctcatggaaaaagggaaagggagtccgtccccttcccttgtccgctttcattatagcgtttctgtccgaaagaaccaagtccggccctttccgggagctatgaattaaagaccttgttttgcgatgtaagctgcaaggtcaacaacgcggttagagtagccgctttcgttatcgtaccaagagattacttttaccatgctgccttccataaccattgtagaaagagcatcgattgtagaagagttagcattgccgttgtagtctccggatactaatggctcttcgctgtagccgaggattcctttaagatcgccttcagccgcttctttaagagctgcgtttacgtcttcagccgttacgtctttgttaagttcagcaactaggtcaacaagagaaacgtttggagtcggcacacgcatagctccgccgttcagtttgcctttcagttcaggaagaacaagggaaactgctttagcagcaccagttgatgtaggaatgatgttttcagctgctgcacgcgcacgacggtagtctttgtgcggaagatcaagaatttgctgatcgtttgtgtaagagtgaacagttgtcatcataccgcgtttgatgccgaatttgtcgttaagtacttttgcaaacggcgcaaggcagtttgttgtgcaagatgcgttagagataacatggtggttagccgcatcgtatttgtcttcgttaacacccataacgattgtgatatcttcttcgttagcaggtgcagagatgataacttttttcgcgcctgcttctaagtgtttcgcagcgtctgcgcgttttgtgaagaaaccagtagattcaactacgatttcaacgccttgtttgccccagctgagtttcgcaggatcgcgctcagcagaaacttcgattgttttgccgttaacaacaaggttgctgccgtcaactttaacttctgcatctaattttccgtgtacggaatcatattgtaaaagatgagcaagcatgttagcgtctgttaaatcgttaactgctactacctcaacttcaggattgtttaatgctgcgcggaatacgttacgtccaatacgaccaaaaccgttaataccgacttttactgccatgattatttcctcctttaaataagtgagagatatttatattgagggactgttatcccttaataacttctttgcggctccttcgtccgtgacgagaaccgtgtttcgctgctttttaaaataagcttcgattgcttctgcttttgatgatccgcccgctaccgcgataatgtcgggaatggcatcgaggtcatcgagctgcattccgactgaatgcaccttgtgaacgacttctccgtccgcattaaagtagtagccgaatgcctctgtcaccgcatgattgtcatctattttcttcaaatcttccaaaggcgtgtttcttcgctccgccattgttctagcttcgccgattccgtgaacgagcatactcgctgatttaatcgtgtgaagcacctcttttacggaaggctcttcaataatagatgagtaggcgccttgtgacagctggccgggaacgaacaaaagccggtaagtgcctgaagccttttccgccatatgcgcgcatatggtgttcgcctggtttttcacatcttcgcctaaaccgcctcttgcgggcacaaacaggagctcgcggttttttgaatccggcgtcatcatatcggcgacggcttcaattgtcgtaccgccggttacagcgacgatatttttgcctgaaaatctctttttcatacatgcaacggccgctctccctaattcttttttgacccaaggagattggtcgctgtctccggaaacgataatggcgtctttcagattgagccgctcttttaatgtcttttccaaaagcgtcaatcctaaaacatccttcatcgtatcttccagaatcgaaagcagtgaatagccctcttccgtcattgtcatgccgtttgttttaatatcgatgagattttgttcttttaagaactgaacctcgcttctgagaacgcgctcggtcaatccgagactggctgcaagacttctgcggccgatcggttctgtaagcctgatatactgcaagatttcaaatcttttctgcatcacaagcaaaagatcaggcaataattttttttgagcttgtattaactggttcatgactcaaacgttccttcctattcatactggacagaaaatgtcccgctatgacaaaaaacgtcccatcatagccaaaaaaaattatgtctgctttctttaattattttaacaggatgacattgttaattcaactgttaaaggtcaattcctcgacattcttcgcaggatttaccagtatctccttgatacagtcattatatacagaaacggaatgaaggtgacagacaaaagcccgccgcagcggacttttgccgtaaaacgctttcattttatccagagtttttctatttcttctaatgatttatttttcgtctcggggcagatcgtcacgacaaacaagaaacagagaatattaatgacggcgaatatccagaaggtgtacgcgagccccaacccgctgatcatcatcggcacgaactggccgatcgcccagttggcccccataagaatatcgtcgcaataccggcggcgcgtgcgcggaggtggttcggaaagatttccgaaatcatgatccacgtaatcggcccgactgatacgcagaaagcggcgacgaatcccaatatgatgacgactaaagccggaccgctcgccagctgaaaataaaaggatgccccgattaagatcatgaacagcgccataaaggcagatccgacccccatcagctttttccggcctaccttatcgactaaaagaaccgcgataatggtgaaaatcacttcaacgacaccgacgatgcatgtcgtgataaaccccgcattttgtccgaagcccatcattttgaaaatttccggcccgtaatacgtaattgcgttcatgccgatgacctgattgaataaagccagcagaatcccgatcacaagcgcttttctcagccccggtttaaacagctgagacaatgaacccattttttctaattgtaaagacgtttcgatttgtttgatttcttctttcgcggtctgctcgccattaatgcgcgtcagcacggtgagggcttcattccggcgccccgctttcgcaagccagcgcggactttccggcacgataagcagcacgataaaaaagatgacggacggaatcatgccgtaagcgagcatccaccgccagccggtgtgcaccccccattcatacgagccggactgctggacggcaaggttaataaaataagtgccggagatccctaatatcgtaaacagctgatacagtgaggaaagactgccgcgtatggccggcggagcggcttcggtaatatacgtgacagaaagcgaggagcccatgccgattcccagaccgccgatgactctggcgatcactaaggaagacacactttgagaaagcgcagagacaaccgctgacaccgcaaacaacagcgccgctgccatcaatatctttctccgtccgaaccggtcacttaaaaatccggaaattccgacgccgaaaacaccgccgatcataatacttgaaatcacgagcccttccataaaaggacttaagcggtacaaatctttcaggaaaccgatggcgccggaaatcaccgccgtatcataaccgtacaaaagccctcccagtccggccgcgcatgagatgagaatgacaaaccacttcgaatgctgccgagtgacaggtacatttgagccaattggtgccgggtgattcttcatgaattttaccctcccgcgaataatagaataaaaacgcttacaaaacaaagtgcggcgcttgagttgctttgttttcttcagaaccgccacatttgtacgtacttataaagaattttatctaaaaataaggaaaattagtacgtacaaataaagaataagcagtttttcacaatctgtcaattatttttacagcttgatgaaagggcttactatgttatactggaatttgtccgtatacattttggaggaattgatatgctaccgaaatatgctcaagtaaaagaagaaatttgttcatggctgaatcagggaaaaatacagccggacgaaaagctgcctacggaaaatgagctgatgcagcagttcggggtcagccgccataccatcagaaaggcgatcggagatttggtctcgcaggggttgctgtacagcgttcagggcggaggcacctttgtcgcttcacgcacggcgaaatcagccatgcattcaaacaaaacgatcggtgtcattacaacgtacatatcagactatattttcccgagcatcatcaggggaattgaatcttatttaagcgaacagggctattccatgctgctgacgagcaccaacaacaatacagaaagtgagcggcggggccttgaaaacctgctgtccaaaaatatagacgggctgattgtcgagcctacgaaaagcgcgctgcagacgcccaacatcggctactatctcaacctggagaaaaacggcattccgtttgccatgattaacgcctcttatgcggagctggccgcaccgagcttttccgtcaatgatgtcaaaggcggcatgatggcttgcgaatacgtcatgtccctcggccacacgcacattatgggaatctttaaagcggatgacacgcagggcgtcaaacggatgaacggctatcttcaggcgcaccgggagcgcgggatttttccgtctccggacatgatcgtgacttacacgactgaagaaaaagaaaccgtgcttcttcaaaaaattaagcatacccttgagcaaaacagcggatcatacccgacggccattctttgttataatgatgaaattgcgctgaagacgattaatcttctcagagaattcggcttaaaggtgcctgatgacgtgtcaatcatgggctatgatgattcacatttcgcccagatttccgaggtgaagctcacctctgtcaagcatccgaaatccattatggggaaagcggcggcaaaatacgtcatcggctgcttagagcataaaaaaccgaagaaggatgacgtcgtgtatgaaccggaactcgtcatccgaaattccgtcaggcggatcggcgaataaaaaaagcaatgtgcgcggcacattgctttttttgctcagctgttttttaattcggcgatgatctcaaatgatctcattctgtcggcatgctcaaagctttctgaattcaccatgatttcatccgcctgtgttgtccggatgaagctttccagcttttccttcacacgctccggtccgccgacgatcgttgaactgagctgttcattgaccatcgctttttcatacggcgaccagatttgatccatgtcttcaacaggaggcttcagctggttcggcgtgccgcggacgaggtctaaaaatctttgataatgcgatgtcgccagatgctccgccttttcatccgtatcggcggcaatgacggtgacgccgaccatcgcgtacggttgatccagtacgtctgacggacggaaggagcttcggtacagctcaagggcgggcacggtgtttttcggtgagaagtgagccgcaaaggcgaacggaagcccgagctctcccgcaagacgcgcgctgaagccgctcgatcccaaaagccagatcggcacgtccagcccttcgcccggaatggcgcggacttgattgcgcacattgcctgagggtttgaagtaatttctcaattcttcaagctgctccgggaaatcctccccgctgtttatgtttcttcttaaggccctcgccgttaattggtcggtacccggcgcacgcccgagtccgaggtcaatccgccccggatataacgtttcaagggttccgaattgctccgcgattataagtgacgaatgattcggcagcataatgcccccagaaccgacgcggatttttttcgtgccgccggcgatgtggccgatcagcaccgccgttgccgagctggcgacaccttctatattatgatgctccgccagccaatagcggttatagccccactcctcggcgcggtgcgctaaatccatgctgttgcggaacgattcagcaaccgttcccccctgtacgaccggcgataaattcaatacggaaaacgcagtatctttcaatgtatgttcagccatcgttttctcctttatggtttagtgtaagcagatcttaaacaaggtctctaccacacaccttaccacagcttttcccgtgagttaaacaatttgattcgatgatcttcgaacaatcagtcagcggtcgtcactagtgaactctgtatgaatgaatctattacattcagatatgaagagcctagaatgatataaaaatgaaaagatatcattgaaagaacagaaccaataatgttaacatatgtcatatattgaataggaaggaagtcatagtctatatgcgtaaaaaaatcttaatggcactcacaacagctttactggcagcaatcttctttaccggaaacaccgataaggcatatgccgcagacttttattccggcactcagcagcatttaaatgtaagcggatttaccgatgcctcctactacacgaaaaaagcgaaaagtgtcgattttactctcagtacagcgtatccgtcagatcgaacctttaaaggaaacctatacttacagcgaaagtccggaaagaaatggacgacttgcaaaaaaacaaccttttctttctcagtaagggtgactaagtcattctctttaaaaggatgcaagacaggttattatcgtgtcaaagctacgttcagcggttcaaaacttgtcaatacgacaaactcttttaaaattaaccgataagattcagggccctaagatcattagggcctttttattcattctttgtgagctcctgcgcgatttgaataaaaagttttgccgccaatgaagcctcttttacagaaggaacggcaagcagaacatcacggtacaccgcctgattgagttcccttgtcacgacattttccggcagtgatattccggacatagacatttgtgataatatcgcaattcccagcccctctttgatcatgctgatggacgtattgacgttgtaaacagtgaatgcggcagtcagcacagaccctgcctccttaaacatatcaataaacggtgattcgtatcctccgtcacagatgatcatcggctggcggtcaagatctttcagagtaattgactcacagctgcaaagcggatgatcatttctaagcacgacggccattttatcttttttcagcggcagatattccatgtcttccgtaggaaaaagagtgatccccacatctattacccgggagcggagccattcctttacttcgttaaccgttccttcataaagcaccaactcaagtttcggataccgttttttaaacacgctgatcagttttggaatgaaataagcggaagcggccggaaatgtgccgatgtgaatcgttccctgttcaagccctctttccgcggccgccagctgctcggctttttctatgcctttgagcacctctctgatatgaacgagaatttttccgcccgtgtccgtgagccttacgccgttgcggcgctcgcggatgatcagcttgatgccgagctctgactcaagcgccgagatggcatggcttacggcgggctgtgtcatattcagcgcctgccccgcttttgtaaagcttcccgtttcagcgatttgaacaaaaacccgcagttgtgtaatcgtcataacgttttacttatgctccttataaaaaagattcattttatttatcttactgattaccgtatcatatgatggaattgttctacaaggagtgaacgacgtgaaacagctttcgaaaatacagacggctcttatgctggcgtttctagtcacggtatggggaattaactggccgctgacaaaagccgcgctcgcctattcgccgcctcttctgtttgccggaatccgcacgctgatcggcggacttctattattaatggtggcgctgccccgttttaaaaagctgcgttttaaagaaacgtggccgatctatcttatttctgccattttaaatattactttattttacggcctgcaaacggtcggcttgaattacctgcatgccggcttattttcagccatcgtgtttttccagccggtgttaatgggcgttttttcttggctgtggctcggggaatcgatgtatcctttaaaaatagccggtcttattctgggctttgccggtgtcgccgtcatcagcgcagccggtttcggaggccatatttccatcgccggcattcttttggctctgggctccgcggtcagctgggcgctcggcacggtatatgtgaaaagaacgggcggacgcgcggactctatctggatggtcgctcttcagcttctgatcggcggcgtgctgcttgtcagctccggccatttttcagaaagcttttcagcgattcaatggaaaactccgttcattctcagccttctgttcatttcggtatttgtcatcgcactcggctggctcgccttttttacgcttgtcggttcaggggaagcaagcaaggttgcctcttacaccttcctgatcccgctcatatccattgtcgtcagctcgatatttctgcatgagccgctgaccgtcagccttttagccggactgcttctgatcgtcacaagcatttgttttgtgaatataacaccgaagaaactgaaaacacctgctctggccgcagaaaaaaaggccgttcattaaaaaaactcttgccgcggggcaagagtttttttatttattgacgtctccctttcacgagatacgcagccgtaatgagcaggtagatggccgcagtgatgcatgtgatgacgatggacgtcgtcgcaattacgccgatcaggatggccaaaagcgcaagcaccgcgaaccatgtcgtgtacgggaaccatttgacgtaataagccggctgttctgttgaatgttttcttgattttaaatgggcgaatccgataatcagccagatgaacagcacggtatagccgagggaacccatcaaataattaaacgtccggcttcctgcgaataaagaaatcaggacgcctacatataaaaatgacgtacaagtcagaatcgcatagacaggaacctttttcttcgatagttttgaaaagattttcggcacccggccgtcagaagcctgcgtaaataagacgcgggatgatccgtacagtcccgagttcatagacgagataatcgcaagaagaatgacggcattcataatatggtcggcacccggaattccgatcatcttaaatactatgacaaacgggctttcgggaacgctgttgacttgattccaaggaatcaggctgacgatgatgaaaaacggcagcaagtaaaaagcgacaatccgcgttaacgtgcttcggacagctttcggaatcaccttttcggggttttttgtctccgccagcgtgacgccgatgatttccgttccgccgtatgagtagatcacgacgagcatcgccgtaatgacgccccccgctccatgcgggaaaaaccctccgtgatccgttaaatgagacagccccggcgccgtgtgattgccgaatgagaaaaataatagcagaattccgcataaaataaagatgacaatcaccgtaattttaatgagcgcgagccagtactccgtctcggcaaacagtttcacagaaagcatgtttacgaccgtcaccacgatggaaatgatcaaagccagtatccatatcggacattccggcagccaatattgaatgaaaatggcggctacgaccgcctccgcggcaatattgagcacccacattttccaatagatccagtctaaaaagtatgcagcgtacgaaccgagagactgctgaaccaaatcacggaacgtccttgcatgtttgtttctgacggccatttcggccagcccctgcataataaacagcagaatgattccgccgaggaggtaggccaacagcacggacggccccgcttcatcaatcgccgtgctgctgcctttaaagagcccggccccgattgcgcctccaagcgccatcatcataatgtgtctggacgacatcgtccgttttaacgtttgcttgtccttttccatctatcacacgccctctcgcaaaaagtgttcatcacataaaaaagcacgccgcctctttaggaaaagagacggcgtgcctcaggcagccgcggtaccactcttgttgatcccgaatatccggaatccagcttaaaaaccttttaacgaaggtcagccgttaggacatagggaatattccgacaattccgttccgccctgccacttccgggcgagttcaaagaacaatcagtccgcgtttcaccaacccgcggctctctttttctgactggattctcttactgctcccgttcacagtgttttatgttaaatgaatctcttgagtttttattttctgaatatagtaacataatatacagtcttctattttcaaagtcaatactaattttttccgtctattgtccttcccggtgattcggaaatttcagctgaaatccggacacaaggctttgctttccggcgccatgctttccgctttcacctttgtgtttgcgtataaaaacagcgcaagcgcaatgccgaatgatatgacgagaatccatgcttttttcattcagatgcctcctcactttctatcatcggcggctttttctctttttttacacacaaaattgaaaaaacaattttaaaattctgttttccttatattgaaacttgctttatcataaaagtatgcgtttacattcgagtagggaggttatagtatgacccctgtgaattcaagcagcatcgggaagattcaggcggccagcaaaggtttgtcgccaaaattgagagcgattgcagaccatatcgtgaaggaaccgaaagacgtggttcacctttccatcattcagctggccgaaaaaacgaaaagctctgaagcgacgattttcaggctgtgcaagcggctcggtttttccggctatcaggatttaaaaatcgcgctggctcaggagatcgttcaggagccggtgcagcacattcatgaagaaatgagccccgacgacgatatcgaagtcatcatccggaaagttttccgcacaaacatttccggtctgaccgatacctttcaattattagatccggccgacgttgaaaaagcggtagaaatgatccaccgcgcagacagaatcgaattttacggaaacggcggttccgggctgatcgccactgacgcgtatcataaatttatgcgtacgggtataaattgcatcgcgcatacggattctcactttcaggcgatgtcagcgggtcttctcggtcctgaaagcgcagtcatcggcatttctcattcggggagcaacaaggacgtgctcgacgcggtcaaaacggccaaatcgctcggcgccggcacgatcggcattacaagctaccaaaagtcgccgctcacccagatttccgacgttgtgctgtatacatcaacaagggagacggctttcagaacggaggcgatgtccgcaaggcttgcccagctgtcggtcattgatacactgtatttcgccacggcccggctgcggcaggagaaaacgctcgccaacttgcagcaaatcagaaaaatgatcgcgcacaaacgtttgtaatcgttttctaaatatttttttcaaaagagagaaagccgatacagcgggaattgaggcaattttatgaaaaaatttttcttcttcatcgttgatttataaaaaaattattcctataattgactttgtaagggcatacattataaatctatcttattattcaatcagattaggcgggatatattatgaaggaaacccaagctgttatcggtctggatatcggcacgaccagtacgaaagctgttctgttcggaccaagaggcaaagtgttagccaagcattcggttcactatgatttaatacagccaaagccggcatgggccgagcaggatcctgagcacattttggaagcggtgatcggaagcatcaggggcgccgtcacaaaggccggactgagtcctgacaatctgcttgcaatcggcatcagcaccgccatgcactcattgatagctgtcgatcaaaacggcggcctgctgaccaaaagcatcatttgggcggacaaccgcagcgccgagcaatcaaaacggattttaaaagagatgaacggttttgatatttataaaagaacgggtacgccgattcatccgatgtctccgctttccaaaattgtgtggatgaaagaacaggacaaggagacattcgcgaaaaccgccaaattcatcagtattaaagaatatattctgcacgagtttttcggaacttatgtcgtcgattattcgatcgcttcggcaacgggactgttccgattagatacgctttcctgggatgaagaagcgctcaggattgccggaatccgggaagatcagctgtcggacattgtgccgaccactcatcagctgcgcggccttgcgccggaaatcgctgcacggatgggcatccatgcggatacaccgtttattatcggcgcaaatgacggcgtgctcgccaacctgggagtcggcgcgatcggcaaaggcgaagtggccgttacgatcggaacaagcggagccgtgcgttcggtgacggatgcgccgattacggatgaaaaagcgcggacattctgttacgcgctgactgacaagcattgggtcatcggaggcccgacgaataacggaggcattatgctgcgctggcttcgagacgaattcgcttctccggaagttgaaacggcgaagcggctcggcattgatccgtacgatttaatgattgatattgctgataaagtgcccgcaggctctgagggattgctgtttctgccgtttttatcaggggagcgcgcgccgttttggaacccgaatgcccgcggaacgtttttcggcatcagcctccgccataaacgggagcattttatcagagcggtgctggaaggcgtcatcatgagcgtcttttcaatcggtgtcgcactgagagatttggcgggccccgcaaaagacgtgcgggcttcgggaggatttgcgagatcgccgctgtggaggcagattttgtccgatacgatgggacgcgaagtcctcgttccggaaagttacgaagcctctgcgctcggagcggccgttctcgctttgcacagccttggcgaaatggaacggatcgaggatgttcaggactggatcagaatttcgcaccgccatgaaccgaacgtcaaaaacagcgaaacatatattgagctgttttacttatacgagcggctgtatgacaagctcaaagatgaatttgacgtcatcagtgaatttcagctcaaacaaagccgttaattcttctttgaaagaaagggtgaaaaggtcatgttactgtttattgtcattgccgctattatcgttttactcttattgattacggtcgctaaattaaatccgtttatcagtcttttgattacatccatccttgtcggtttcgcaacgggcatgaatctgccggacattatcacttcaatgaaaaccgggctcggcaatacgctgtctctgcttgcgatcgtgctggccctcggtacgatgctcggaaaaatgatggctgaatcaggcggtgcggagcggatcgcccacaccctgatcggccgcttcggcaaaaagaaagtgcattgggcgatgatggccgtcgcttttattgtcggcatcccggtctttttccaggtcggcttcgtcctgctcgtgccgcttttgtttacgattgcgattgaaaccggggtttcattagtgacgatcgggattccgctccttgcgggactttccgtcgtgcacggattggttccgccccacccggcggcgatggcggctgtcggcatttatcacgccaatgtcggaaaaacgattttgtattctttaatcgtcggtattccgactgccatcatcgcggggccgctttacggaaaatggattggtaagcgcattcataaacccgttcccgaactgttgaaaaaacaatttattgaacggaatgaaaaacgcaagcttccgggattcgcaaatacattgtttacgatattggtaccggtgatcctgatgcttatggcaacgcttgccgaaattgcgcttccggaaaaaagcacgctctatgaaacttttaaatttatcggcgaccctgtcacggcgcttttgatcgccacggtttactcctttttcagccttggtttttatcagggctttgacagggaaagcattttaaaattcagcaatgactgtctgggaccgatcgcttccattctgcttgtgatcggagccggcggcgcttttaacaacgtcctgattgattcaggcgtcggcacgtatatcgctgacatggcgaagcactcaagcttctctcccgttcttttaagctggacgatcgcggcggtcatccgtgtcgccacaggttcagcgactgtcgccatgatgacggcggccggcattgttgctccgattgcatctgtcatgccgggcgtcagcagcgagcttctcgttttggcaacgggagcgggctctttgattctgtcacatgtcaatgactccggtttctggctcattaaagagtatttcggaatgacggtaaaagaaacgttcctgacatggacggcgatggaaacgattatttctgtcagtgcgatctgttttatcatgatcattaacgcgtttatataaaaacaaaccccggccgcaaaccggggtttgtttttttatcggtcattcacgaggatataagcggctttaacgggtccgtggacgccgacaaccaaatccatttcgatatcggccgagttgctcggtccggtaatatagttgatgcaggaaggaacggtgacgccgtctctgatctgctgtttcagtatatcgctggcctgtgtcattctcggcacaatggaagatttcgggatgattgcgatataggtggtcggaagcaggctgacggaacggccggcatgctctgacgcatacaaaacgacggtggctgattccgcaagcgtgatctcgctgaatgtgatgcccacattcgcttgttccgctttttcaatatttttcgctccttgttccgcgtcccattcccaaacgggaatcccttcgtccggccactcttctgtcataagggtctgcaagccgtacatttcaaaccggctgtcgttcggaatgatgacaggccccccttcaaagcggttcacctgcgtgcgcaaagcgtcgtaaagcccggctgcatccgtttcgatcagttcggtatgaatgttgacgcagtggtctttcagcatcgtgacaagatcgtcttccgtacagtccgcatgcgtttgatattgaggctgatacttccattcaggcagggacacgcctgatttcctgcgctctctgcccagacttccggcgatccggtttagaaaggattcctgatgtgtaaccgtccctttcatcatcattcttcccccttttgtttttcccggtctttaaaccaatctctgaatctcgatttatgcggcgccgggaagtcccgtattgccgtccattcttttaacggccccggcccttttgatattttgtcatcctccgtaaacggcgtcatggcggcaggcgcccatttcgatcccagtttataaagggacggggatgacgagccgagcccgaaggctttcatcgccagtttttcgctgatcggcgctttgccctctttttccacaatgttctgccgatgcttgagcagcagctcgtgcagcggaattttaaccggacacgcttccgtacaggccgcgcataaggaagatgcgtacgggagctccttgtattcgtcatatccgccgagaagaggcgataagacggcgccgatcggacccgaatagatggacccgtacgagtgtccgccgacatgccggtacacgggacagacgttgatgcaggcggcgcagcggatacattgcagcaccgattggaattccgtgccgagtatgcgggaacgcccgttatccacaaccacgagatgaaattcctcaggcccgtcagcttctccttgctgccgggggcccgtcagcgccgtaatgtaacttgtaagccgctggccgaccgcgcttctcgtcagcatgctgacaagcacttcaaactcagaaaatgaaggaacgatccgctccattcccatcacggtgatctgcgtcttcggcagcgcggacacaaggcggccgtttccttcgtttgtcacgagactgaccgatccggtatccgcgattgcaaagttgcagcccgtgatgccgacatccgcttcgagaaattttttccggagaacgctgcgcgcgtgcatgacgagctcttccggtttttccgtctgtttgtattcgagtctctctttaaacacgtcacggatctgctctttgtttttgtgaagagcgggagcaacgatatgtgacggcggatcgtgatcgtcaatctggagaatgtattcgccgagatccgtttctgtgacttcacagccctcttcctcaagcacttcgttcatattgatttcttctgtcaccatggatttggattttacgatttttttggcgtttttctgccggatgacatcgcggatataggaggacgcttcttccgccgtttcggcgaaaaagacatgcccgcctctgttggcgacgttttcggcgagctgttccaaatagaaatcaagattgtccagcacatgctgtctgatttcttccgcatgtgaacgccaatcctcccagtttcccaattcctcggccgcctgaagcctccttatcctgagccgttcctgcgctccggagacggctcctctcataaactcattatctattccttctgatacccgctctttaaaagcggcggtaccgattttcatcgccatgattttacccccttgttgtttctcgtcttatctgctgttcagcacttctgcgatgtgcatgactctgacgtttttatccttacggtcaagacgcccgccgatattcatcagacatccgcaatccgccccgatcagcacctcggcctccgtgtcttccacgcaggcgaccttttcatccaccatttgttcagagatttgcgccattttcacagaaaatgttcctccgaatccgcagcattggtgttttccgggaagcgcggtcagctcgagccccttgacatggcgcaaaagcttcatcggctcctccgacacgccgagcagcctcgtcatgtggcacgatgtatggactgtcgcttttttatgcagcaccgccccgacatcctccaccccgagaacgttgacgataaaatccgttaactcatatgttttgtccgcaagctgctgcgcttttgcggcccacttcggatcgtcctgaaacagatgcggatattcacggaacatcgtcgtacaggaacctgacgggctgacgacgtactccgcttcttcaaacgcggcaatcatccgcttcattgcttttttcgcatccgtcacatacccgctgttgtatgcgggctgcccgcagcaaatctgcccctcgggaaaatccacctcacacccgagccgttccagcacctcaaccgtcgcctttccgacattggtctgaaacatatccacaaggcacgtgacaaataatgagactttcatgatgaacccctctttcatcctcagtatgtgatccggtcatctgatgacctgtttttggaaagctctataaatatcctacactattctgaatatggattggaaggtttttctgaaaaatcctttcgcccgatgcgctgaagggtaaaaaaaagagaagcctgaaagcttcccatgcttctctagatcccgtttttcagcaggtgtcccagtttttgcacaccctcttttatcgcggctttaccgggaaaactgaacgacaggcggagatattcggcaccgtcttcctgatgcggaaaaaaatattttccgggtacataggaaacgccgtgagacagagccctcgccagcagtgcggacgtatcagcccccggcgctttcacccatacaaagtaaccgccttcaggcacgtgccaggatgcggattccggaagatatcgcgctgatgcggcgagcaaaacatcacgtttgcttcgatatgcttcccgcaaggcggcgagccgttcttcaatattcgtttgttccagatagacggcggtcaccgcttgggaaaacggatggcctaagtctttttttaaccatgacaatgccgtgatgaatgcggcgtcccctgcaatccagccgatcctcatacccggggcgatgacttttgataatgaaccggcgtacagcacccggccgttttgatccatggctttcaagggcggcggaatatcggtgaatccgagctcgccgtatgcatcatcctccaagatgagaaaatcatacgtttcggcaagctgaagcaggcgggttctccgcttcgatgacattacggttcccgccggattctgaaaagcgggtatcgtgtagagaagacggggaagcacaagcccttttcgttttctttcctcaagcataaacgctaatgtttctgtttgcagaccctcttgatctgtcggaatgctcatgatatgcggtgtataatttttaaaaatctcgagcgcttccatatagaccggagcttcaacggcagcggcggtttgttcatcgaggaaaacccgcgcagccagatctatcgcctgacaggcgcctgatgtcacgatcagctcatcgtcccggcagtgaatgccgcggatggctaaccgttcttgaatctgcttttttaaaacggccgtcctcgggcttcctatataatgcagcggcagatcacgctcctcatccagaaggcgggaggcggcttctttcagctccttatcaggaacgagcgcgggatcgggatagccggaatgcagagggatgcacgctttcggaactgccggcatccattccccgggaggatcatttgtcagagctttctttacatggtcagaaaaaaaagattcggcctgcatgtgatgttatcccctttcacaagtcagcttctatacattttcttcaaaataagcccccagcacttcttccacattcgtcaggtgcgccgtcatcgctgcttccgcttcatccgtgtctccggcggcgacggcgctgtaaatgcgttcatgctcttcatacaatcgctgcacgctcgttcgtttagaaaacagccaaatttttctcgtttctctcattgtttccaaaaggagcgcggagacatgattcatgagatgcttaagcagcccgttttgtgatgcttccgccagcgccatgtgaaaggagaaatctgctttttcgcccaattcttcgtctccgtcaatgtctttcatctccatgagagcttggcggattttttgtaaatcgtcttcggtgcgtttttcagcggccatggcggcgacgccgagttcaagcagctttctgacttcgagcagctgtttgacgtcctcttttttcatcaagagggcggaagaaagcggctgggaaacatgagacggctcaaattctcttatgtatgtgccttctccctgcttcatgtcgacgagccccatcgctttcaaagccgacagcgcttctctgaccgccgagcggctgacctgaaaactctcggaaagcgcctgaacagaatcaagcttttcccccggcttaagctcgcccgcttttatcttctccagcaatgcgtcagcgacttcctcgtagatttttttcgttttaatttgtttatatttcaacgcgatcaccccgtcacttgtgaatcttgatgtttatcgtctattatacttctttttttgtgtagccgacaggttcagacaatttgttcaagaaaagtattgtactttcaaaactttcaaaatataatgctaattaacccggtcatcagatgaccttatcataaaaagtaatcgtttacatgacataaggaggggttttttagggatgcaatggacacaggggtacgctcctttagggggaaatttgcttttatcggcagcttgcgcgctcgtgccgattatcttctttttttgggcgcttgcggtgaaacggatgaaggggtacatagcggggcttttaacgttagccgtttcacttttaatcgctgtatttgtttacggcatgccggcggaaaaagcggtgatgtccgcttctcagggagcggtgtacgggctgcttccgatcggctggattatcgtcacatcggtctttctgtataaaatcaccgtgaaaacgggacagtttgagattatccggagttcggtgctctcaattacagatgaccggcgtttgcaggcgctgctcatcgccttttcattcggggcatttttagaaggcgccgccggtttcggcgctcccgtcgcgatctcggccgctttgctcgtcggacttggttttcagccgctgtatgcggcgggaatttgcctgattgccaatacggcgcccgttgccttcggtgcgatcggcattccgattaccgccgtcgaaggtccgaccgggataccggcaatggaaatttcccaaatggtcggccggcagcttccttttttatccgtctttattccgctttacttaatcattttgatgagcgggtttaaaaaggcttttgaagtatggccggccattcttgtttccggcgtctcctttgcggccgtgcagtacgcaagctcgaattttttagggcctgagcttccggatgtgctgtcggcgcttgtttccatggccgcgctcgctgtatttttgaaattttggaaaccgaaaacggcctttcgtttcgcggcagaacgggaatcagcagcggccgctgaccgggcgccgatcaagtacgggggcgccgcggtgtttaaagcgtggtctcctttccttcttctgacggccatgatatccgtttgggggattcccggcgtgaaggctgctttaaccggtcattatgaaggaacgtcaatgtggctttcctggctgaatgcagccgggaaagcattgaccttcacgcctcccgtcccatttgtaaatcagcagattcttcaggcggacggcacgccgattgaagccgtgtacaaacttgagcttttcggttcagcgggaacggcgattctgattgccgccgtcatctccaagttcgccctcggcatgtcgtggaagacgtggggcgaagcgtttatagaaacggtgaaagagttaacgcttccggtcgtgaccattgtttctgttgtcggctttgcatatgtgacgaatgcttccggcatgagcacgacactcggtcttgcgcttgccatgacgggcgcgatgtttacctttttttcgccggtgctcggctggctcggcgtatttattaccggctctgatacatcggccaacctattgttcggcggattgcaaaaggtgacggcgctatctgtcgggatggacccggttctctccgttgccgccaattcatcaggcggtgtcaccggaaaaatgatttctccgcaatccattgcggttgcctgtgccgctgtcggtctggcgggcaaggaagccgaccttttccgctttacgattaagcacagtctgtttttgcttctgctcgtctgtctcattacatttttacagcatcatctgttttcatggatgatcccgtaacacggagaacctccccggggtttggctcggggaggtttcagctgtaccgttttctcgccgatgacggcggaatatttaattggtcacggtatttggcgacggtgcgccttgagattcggatgtcatattgttcatgcagcagatcggcaagcttttggtctgaaaaaggtttctttttatcttctttacggaccaatgcttccagatgcgcttttacggcataattggaggcgccgccgtcccccgatgattcagctttcgccgagaaaaatgttttcatttcatacagtccgtacggcgtctgaacgtacttccctttgatggcccggctgatcgttgattcgtggagctccagcgtttccgccacctctcttaaggtcagcggctgcattccgctttttcctgtgagaaaaaaggattcctgccgttcagtcaggacgccgataattctcgtgatcgtttgttttctttgcgacaaagcccggttcagccagcgccattcctgatattttgccgacagataatttttcgtgtcacggcacccggcggctgacaagagcggctgataatgggcatgaagctggatgtcaggaaacgaacggctgttgagccgcgcttgaatgatgccgtttttcaccgtgatgaaaatatccggttctacgtaaaaacccggctcctcatgcgcataacggagccccggcctcggatcaagcgcgctgatcatgtcagcgatgtcctgaatgtctttaagcggaatgcccgttttaagtgtaagcgctttccaattctttcttgcaaatagctcaaaataggcttcggcaatccattccgcctgttcgttccgctcgggcagacggcggagctgaagaaggatgcattcctgcaaagaccgggcgccgattcccgcgggctcaagggattgaagctttttcagaaccgcttccgtctcctcttgtgaagcggatacatggtcggcggcggctggtatgtcctcttttaaataaccgtttgaatccaatgaatgtatcagataattgaaaatttttttctcatcatcggacagcttcatgtctaaggcttgctgtttgagcgaatcctgcagcgttttgcgggtaagtctgatctgctggcttccgtcccgttctttcatcctgtttttatttgttttatggtaagatagtggcggcgtgtctgtttcctttcgttcaatcagagggttttccagtgagagctcatcaatatatccggccagttccgcggaattgtatccgagtaatgtgatggcctgtttaagctcttgcgttaattgaggctttaacatttgtgtttgctgaagtttgatatccatcatgctcactccccttttttcattgtacatgattggtttcataccgtatatacttattaaaaggagttgctttatagatgtcagaacttttttctgttccctattttattgaaaactttacacagcacattgaaatgaatccgaatgaagaccgaattcatgcgatgaacagctattaccgctccgtcgtctcaacccttgtacaggatcagctgacgaaaaactcggttgtgctcaaaagaattcagcatttggatgaggcgtacaacaaagtaaaacgcggagaaacaaaataaaccttccgctcattcaaagcggaaggttttccttcgtgccggcggtttcaccgatcagccggacgtccggcgcttcgtgcgtccaggtgtaataatagttcgcgtttttcccgtatgaattatcaatgacggtattcggtttcccgagaagcgaggacaggatgtggccgtggagccttgacgtttccaccgattcgtacctgctgaaaaacaggaccgcttttttcgttaagaaatcggaatagcggttccaaaaccgcgcaatcggcagcgggtttcccgcttttttattcaaaacattcagcgtttggaaaaaagcgattcccctgcggtcgcttgctgacagaacatcctgccagtcacagcttttaacggaagaattgttttgcagcttcgggttgatttccccatccgtgcggataaaataaagcctgccgcgtgacggaaccgctgacgccgcgatcggatacagctgatgggccatatcaggcataagcccgatatgattcgccgaaaaaaagcgtttcgcagtctcgtatgacacatgatctctcgtaaacaggtggagatccttgtgctccgcaaaaagcgccgatgtcttttgcagccgtgtctcatcctgataataaatcgattgcggcaggatgacgatcctgttttccggaaaggatttgacgattttttccctgaacgtctgatagtacggatagagatccccgaaatttccgccaccctgacagacgatgatcgtctttttgtccgcccggcgcccgaatggaaaattgtcgggattccagcgctgtttcacgcggatgccgtgcgctttaaaaaacgcctccgtccctttcataatcaataaatcccctacatttccgtagaggggatagtcggcatatatgatgtcggattgcggcggtataacgctgagcagacccgtcagcgtctcttttaatcggctcataacatggcggctgtccatgttttctcccctttcgtttcaaacagttgcgcaagtgcgtcaatgacacgctgctgctcctcagaagacaggtcagacccggacggcagacaaatccctcggctgaaaaggttctcagagacacgctcatggtcgctgtgaggataaaagacggaagatgagaaaagcggctgcgtgtgcagcggtttccacagcggccgggcctcaatattctgttccgcaagacaggcgacggcttcttccggcgtcacgccgttatcaagcgtcagagccgtcagccagcggtttgaaaccgttccttcaagctccggcatcatgcggatgcccggatatgtttcgagcgcttcccgataccggtgaaagatttctctcctcgcccggacgcgatcttcaagcacttccagctgcgatatccccacgcccgcgagaatgttgctgagcctgtagttgtaaccgagctcgctgtgctggtaatgaacggcggcatctctcgcctgtgacgcaagaaacctcgctttttcaatcgcggcttcatcgtcagacacgagcatgccgcctcccgatgttgtaatgattttgttgccgttaaaggaataaatgccgaaacggccgaacgtgccgctctgcctgcctttatatgttgatcctaaggactcggcagcgtcttcaatcagacagacgccgtatgcgtcacaaaggctcattaattcatccattttcgcgctttggccgtaaagattgacggcgatcaccgctttcgggagtctgccgcgccgctttgcatcccggagcgcccgctcaagcgcagcgggcgacatattccacgtctcccattccgaatcaataaaaacgggctcagcctgctcatacacaatcggattcgccgtggcgacaaacgtaaaggaaggacaaaatacaacgtctccttttttcacacccgcaagccgcagggcaagatggatggcggccgttcccgagcttaaggccgccgcgcttttcactcccgcatattccgcgagccgcgcttcaaacgaattgacgagcggaccgagcggggcaatccaattggttcggaaggcttctgcgatgtattcctgttcttttccgctcatatgaggcggagacaaataaatccgtttgtttgtttgcatgaaatcatcctttttcattatggataggggagatgacgcgggccggaacgccgaccgccgtcacatggccgggaattctgctgatgaccgcagcccccgcgccgataacggaccaagggccgatgtccatctgcggtatgacggacgcgccgattccgatgtgcgttccttccccgactttcactccgccggcaagcgccgcgcgcggtgaaagatggacgtaatctccgattgcattgtcgtgatcggcaaccgcccccgtattgatgatgcaatgggcgccgatgtcagcgcccgcctgaatgacggcgcccgccatcacaaccgttccgtgtccgacggaagccgtttcactgacgatcgccccggggtgaatgagtgaagcataatcggcagcttcaatcccaagcgtttcagcgaactgctttctgacgccgttgcggccgatgcatatcgtgaacacggcctcggggacgagtttccgaagcatgtgcacgtcttccgtccggcccgtatataaaccgttccgagcggtaaaaccgctgaatccgtcgtccaatatgcccgcaagctccatatcggaacgggcctgcacgatttccttcacgacttttccgtgtccgccgtttccgatcagcacgacctttttcacgatgacatatctccgctgcctgtgaagcgctttgccgtcacatggccggcttggtgtatgccttctgacacgagaacttttttcactgttaaaagcagaatctttaagtcgagaagaaaggtgcggttgtcgacgtaccacacgtcgagcttgaatttctcctcccatgaaatcgcgtttctcccattgacctgcgcccagcccgtaatccccggcttcacctcgtgccgccgcgcctgctccgccgtgtaaagcggcagataatccatcagcaaagggcgggggccgaccagactgatatcgcctttgagcacattaaaaagctggggaagctcgtcgatgctcagttttctgatcagccttcccgttttggtcaggcgcagatgatccggaagcagcacaccgttttcatcacgcgcatccgtcatcgttctgagtttatacaacgtaaacggacgcccgttatgccccggtctcgtctgtttgaacaataccggagacccgatggcgcatctgacggctgccatggcgaagagaagaatgacactcgcgccgcacaataacagcgtcgcggccgctatatcaaatacacgtttcaccttcaaatctgaacagctcctttcacttttcggcatttctgtaaagcaagccgcctttcttctttcgtacaaatgaagaaaaaagcgaatgcggcatagcttatgcatacggcaagccccgcggcgatcagaccggcccagccgtcaagcggtgaaaacagccggataccccggcagacggcccaggcaaatacggccgccgccaacgggccgaacatgcctttgtaaaacgcggttttctgaaagccggtaatatgcgaaacatacagcggcgtgaagacggcatttttcaaaatgagggagacagccccggcaatggtgatgccgtacagcccgagatgtgccggtccgctgagaaccacggccaatatgacattcagtccgcctaaacataaagtaacgacggcgggcgttttttgtttattaaaagccgtccatacgtaaaaaagcggcatgacagagagactgaccaccaaatacgcggcgtgaatatataaaagcggcgccgtctgcacaaacgacgggcccagccaaatcgccagaaacggttcggcaagccctcctaataacgcggcgggaagcgcgaggagaagcccgttcatccgcacggccttattggcgtaagacaggagaccttccatatcgccttttgaataataggaagtcaaaaccggcgcaaacagtgaagcaagcgtcccggcaagacttctgagcagaagcgggaattgaataatcgccgcatagacacccgcttcagacggccccagcacaaggttggccgtcatgaggtcaatctgcagaaacagcagcacgccgatctggttgacagaactccaggcaccggccgaaaacagcactttgcttgtctgtaatgataaagttttacggctgaaagaaaaccacggaatcaatttcttaaagaagaaaaaagtcagcacagctgcacagacggctcccgctaatgccgaaagctggatctgccagatcttcggcggcaggcacgtaaacagagcgagcacacacagcaccctgaccagcatttgcacggcctgaatggaacttgtgatataaagcttgttggcaaaaaacggccccgtcgcgaaccccgccataaaaaacgtcagcataaacagcacgctgccgattacgatagacagcctcacatccgttaagagcccggccggtacattcataatcctgtcaataaaaaaagcagtcccggcgagcggcacagcgagtaatagagatatcacgacagacgcggctaaataattgcttacatacgcattggcctcgtccctgttccccctgtgggcggcgacggagaaaaacctcacaacgactgagctcagcgcaacggtaataatagagaaatagttaatgatattctgtgtcagatggacaaacccaaaagcctcaacacctaatgttttcacaataaagggcgtcatccacactgataaaaacaccgatagtaaaaacgccgtcacattggcgccgaaattaatggcaaatttcatgctccttccgcactgcctttctctttcgatttccgttcgaaaaacgcatgcagaagaagaggaaggcgcattttgcacagaccgagcaccacgcgctccccggccagcagctgtttatggcggcacggcgtcctgcgcacggccgtttttaccatgtcatacgttaagattctgccgatatgcgccgtaatctggtgtgacggctgcggggcggcgcatgcgttggcgatcagcatcggaatctgatgcttgcacaaatatgtatcaatatcgctccggcaggcgtccgtcagcccgtttgcctcataaaaagccattttcgctgcatattgcttttgcagttcgtgatctaagcggggcttaaacggtgtttctgtaagactttgcggattttcccggtagatatacagcccttcgtctatcactttgacacgcgcggcttggcggaacgctgccaagttaaacggagagtcctcggcaaaccggatatcttcatggaacaacagcccttgcaatgcttctcgccggtatatatagcgccacacataccaaataaaccgatgttcgtgcgcgcgggtcagcaatgcggtcatttcatccgctgtgaagacgcggcccggcggaagggacggcggcatatacgttctttctttagacggcgtttctttgtaataaccgcagccggcgatatccagccggttcttctccgcttcttcataaagccgctcgaacattgtttccgtcacataatcatcgccgtccgcaaaaccgatataacggccgcgggcggcttttattccggcattgcgggccgagctgaggccgccgttttctttatgaatcacccggattctcgcatcttctgcggcgaattgttcagccatccggcctgactgatccggtgaaccgtcattgacgaaaatgatttcgatgttcctcagcgtctgttttgttaaagaaaccgcgcattctttaataaaaggctctgtcttatacatcggcacgatcacgctcacaagcggcgcggtcattgggcatcaccgctgattttcgagcgcagcccggcaaaataaacacttcgcaaagaaccgccttcctcatgcttgccgctgagcagccgatttacggcggatgttacggcttcagggtcgggacgttcaagcaatgtcatgttcggtatgtttttcagccattgatagccttccatcaccttatgatcaaacgaacgaatgacgacacaaggcgttttcgtcagcgcacaaaaaatcatcccgtgaagcctgtcagtgacgacggcttccgcgcctttcagcgtattccaaagcgcttccagctccttttcgcgtgtatggcggctgaccctccggccgaccgtcgtggtaaaggaatacagctctccgtactctttggccaaagcttcttttaccatcgttctgtcctcagccgtcagcgcgctctccttatcctcccgtaaacagaggtagatcccttcccgcgctatgccccgctcgcttttatccaaatataagaccatgtcaggctgtttgagcactgtttttccgggaaaatgacgcttcatccattgatacgtcgtctcatctctcgccatcaacaaaaggtcgggatgcgcattgtacacttttcgggcgcgcttcagttccttccgtcccttttttgattcagaaaagtgagccgtcgccggaagctgaacgatccgatattgccggaatgtttttatgataaagcggcgcgtccattcctcataccggtacaaatcccccatgttcccgccgccgatgatgaataccatatcatcggggtggcgctttttgatcagcacttttgccgatctgtatatatccttcatatccacctcgacaatgtcaaaatcgggatactcccgttcaagaaacgttttgcttgcgtaggcgatggcgtgatcgccgagattatcgtgggacgggagcagcgtcagaatgatcttttttcttgccgctgtaagccccgccgccccatccgctcccgttccgaaatgaaattgggacgggtatttgaccttaagcaaaagccattccgcgagattgatttttaaagattgtatcgacatgtcttcaccctctgattttcattttgtactcgattgcccgctgatacgcggctgatgccagcgacacgaacggaatcagcttcagcttcgccaaaagcagaaggcatgagcgtttggcgtcaaacggcgccgttcccgttttggaaaggctcatgcggaatacgggatcagcgcatatccggctgatattcttccacttctcagaaaaccggccgccgttattccgcttccattcattcagcaggcagactgttccgtgctgaacgatgaaaaaatccagctcctgccggtattcgtgtaagcagccgttttcacgcaaaaaagcctcgttcagccgatagagaacgagacctgagtcaaacagctttttctgatagctttgcacaatggaagtcaagtgaatccgataatgatagagcggctgatccacgtacgagaccgcacctgcgaaaacatgcgccctgaggctgaaatactgatcctccacgtgctccagctcatcacgaagcggaaagcgcagctgatgatgctcgatcatggatcttttgtacagcttgttccatgaaaagccgctgactcttccttcaaataaatctttcaggtaccgttgtttcgggcggccctcgtacgctgaagcgatcgttgaaacggcggtcttccccgtatccgcaaattcagccgcatattcgcaaatcacgagatcagcctgatcagccttcgctttttcatacatgcgcaggcaataatcaggttcaacccagtcgtccgcatcaataaaagcgataaattcgccgcgcgccgcctcgatgcccttgttgcggaccgcgccgagcccccggttttgctgatgaacgaccctgattctctcatcccgcttctgataggtttcaagaatcgccgggctttgatccgttgacccgtcattaacggccacgatttcgatattggcgagcgactgattgagcaatgaatctaagcatctttctaaataagtttccgtattatacacagcaattaataaactgaccgcgggtgtttccatataaacctccagtgtccattaccgggaaaaaatcgttctgtacggaagcacagacgaatcgaccggcataagcaagtaactgtaaagaaaataacagacaataatggcgatataaatcagcgcatttgatttttcatcaaaaatcctcacaaaataagggatcaggatcatttggtacaggccgaaatatatattaaaccgggcaaaaataacatcctttgtcgccaaaagaccgaagagcaggccgagcagacagaaattcacgatgacatcaatgtcaggccagagcttccgcagccgctcccggtagcagaaagccaaaaacagcggcagcagcagcaccgcgattttcacgacgttcatcccgttcgtattcgtcatcagccatttctcataatggccgtacgagctgttttccagcacgacgacaaacagcgaaatgaacttctgatacagaaacgtcataagaagaaacaatgccgacagtccgaaaatcgcgggcgaccaggctctttttctgacgagaaaataaaccggaatcataatcagcgctgaggaatgaaaaagcgaacacagcagcacgattgacatataacgcttccagcttccgctgatcacgtagcggacggcccaaaacaaaacggccgccaccatatactgcctgatcccgttaaaggaagcgtaatagtgatacgtgcccaaaaacaaaaatacactcagctcaaacggacggccgaactcaacgagcccctttaaaataaagctgcatgtcacgaccgccacggtgaaatacatgatttgcggatctttcgtgataaaattcatgagccagatgagagccgtaaaccccggatcaacggctgcttttttcgctccgaacccgaagatctcccaaatgctgccgtaatttcccgccagcttgtacattagcgcgtacgtctgaaaatccgtcccgactctgtagcgcaaaccggagaccaataccagcgatagcagcggaacgagcatgacgagctgattcggccggtatccggtcgaaagcgattgatcacgcccgccgcacattttcgcgaaccatgaccaaatataaacaattcccatattgactacatatacaatcattcgttactgttcctttttccaattcatattgtaaagcttcataacagcccccgcattttctcccgcgtcatatcccagccgcctgagggtttctttaatacgcgccccgtcaggctttgccgcctctgctgcccgtaaaaccgcggatgcccattgtcccggcggttctttgaggctgagccttttgaccagcccgagcccggcatcggcttcttccgttatgccgtctgatatcacgcacggcaccccggaggcctgcgcttcaacgagcgtgacgggcagcccttcataaagagacggcatgacaaatacatccagcgttttcagcagatcatgaacgcggtcttctatgccgataaaacgcacatcatcatcaagccccagcttcgccgccagattttccatatcggtgcgaagcggaccgtctccggcgagaatcagctgtaagccgatgccccgctctttcatatcagcggccagccggagcagaaattcgtggtttttttcttctgtaaagcggccgatatggccgatcaccaaacggccgtctgcaatgccccgcttccttttttcagcttctgtgtccgcgcacccgccggcaaataagtcgagatcaatgccgttcggcaaaagatgcacgtctttttctttcccgaataagaaacggcccgcctcttttccgcaggcgcacagtgccgtggcgtttgccgtgatcagccgtctgaaaacaaacagctgcatcccggcaagccgcgacgcccgccccgccacgacgtactgtgcgaatggcagatccgcaccgggacgccggctaaacgagcggcaagcgcgataaatcccgactgaaaatcggtatgggcgtgcacggcggcaaacgggcctttttcctgaatcacccgcttgacctgtttaacaaatgtaatcgggtttgtgctgccgatgctcggcacataaaaaagccgtccgccgagagcgagaatttcctcgtcataagcgcacggatcgttcctatgggttaaaaaatcaaactgcaccttcgttctgtccatcttccggtacaaattcatcatcatcgtttctgcgccgcccctgttcatcccgctgaagatgtgcagcacccgcatcggtttgtcagtcatgttcggcaagcccttctttttggcggatgtccctgtttttatgataacggttcatgaccgcgggcggcgtaatggcgcggatgagcggttttgcgatatacgcgtaatgggaaatcggcagcttcagccgtctgcatgcctgaaaaacgagcaccgcattatcaatggaatacgtaaacgatctccttttgaacgcatcactgtcctctcttactttatacagcgtttcctggagattgtaccctcggaaacccgcttcaaaaaagcgcagccacaaatcgatatcctccatccgccgcgtccgcctgactgaccggtagcctccaagcgctttgtacgcttcagcccgcatcataatggtgccgtggcagaacggtgtgcctttcgccataattcccggtttcggcacgggcggcaaaagccgggcgcccctgacgccgaattcatcaaatacgagcatccccgtgcccacgacttgatagtgggcgtgcttgtttaagaaagcggcctgtttttccagtctcctcgggttggagatgtcatcaccgtcctgcctggcgatataatcccccgttgcgtatgtcagacagcggttcagcgaagcggcaagccgttgattcgtcttattttgaatcagcgtgatccggtcgctgtaatgatccgcgtaacggcgcgcaatctgatacgttccgtcagttgacgcgtcatcacacataatcagttcccaattcttatacgattggctcaggatggattcaatactctccgctaaagtctcttcgcaattataaattcccatgataacggaaattttcggttgtgctcctgcattcatacgcttttctcctttttatccatataaccggcgtaaatgtgcgccatttcctttaccgtacgtgtttctgaaaaaaattccgccgtcctgcgcccttcttgtcccattgcttttcgcagacccggggatcggtacagcttttcaatccgatcggcaaatgccgcgctgtcccctgccggcacgagaaaaccgttcacaccgtcttcgatgatctcacggtgccccctgttgtctgcggcaacggcgggcttttcggcagccatcccctcaagcagattcatgccgagcccttcgcggatgcttgaggcgacggacagatcggcaagctgaatcagctcatgaatgtcacggcaaaaaccgtaaaaccgcacaatgtcggataccccgagtgattcagccttttttctgtacggctcttccatcgcgccttctccggcaaatacgagtttcagctccggaatgcggttcttcagcagtgccgcagcctcaatgagaagtccctggtttttattgccgtttaattcagcggggtatatgaggataaattccccggcgccgaagccgtgtttttctctcagacgttcactctctgcccggctcacagggcgaaacctgtctgtattcacgccgatgccgtgtattttcttcgcgccgcaagctgtttttttcatttgcttggcccgttcgtaatcctcttcattaatcgtaatcaaacaatccgtgtaagaagagagaaatttttcgatcgggtaataaagaagccaatttttcaggggcgctccatcgcagaagtgaaagccgtgcgcggtgtacagcacctttgtccctttttggcgcgcttgtctcgccgcaaggcgtgcaagcacgccgccgaccggcgtatgacagtgaatcatgtcgtagccgttagcctgaatgagccgtttcagccgcctgtaaacagaaagattttcgggatgaaacggcgagcgccggatcggaatggaaaacttttcatcaacgaatggaagattcatattgccgcctgccgcgacgtgcacctcccagcccatatcctgaaaccattgaaaatacggaagatgaaaggctttaaaatgataatcgacagtggcgcagaataatacttttttcgtcatctttctgtcctcccatcacacacctgcggccgcttcttcatgtactgattcgatcgcctcaaacagccgttttctcagctcatcttcaggcagacggctgaattcctccataaaacggatgagcacggcccaatccccgtcgatcgctttcccgatatggattttcggaaaaatctgttccgtatgtacttcattatgattcagcagttcttcatacatcttttctcccgggcggatgccggagaattcaataggaatctgttctgtcgtatagcctgataaatgaatcaggttttttgccaagtcgacgattttgacgggttctcccatatccagaacgaaaatctgccgcccttttgcaagcgcccccgcctgaatgacgagtcttgacgcttcggggatcgtcataaaatatcttgtcatcgccggatgcgtgacggtgacgggtccgcctttttcaatctgctttttgaaaatcggaatgacgctgccgcggcttccgagcacattcccgaaacggacggcggcgaatttggtgttgctgacctttccgaggttcatgatgaccatttccgcaaaccgcttcgtcgcgcccatgacattggccggattgaccgctttgtcagaagaaatcagcacgaatgtttccgttccgcacatatcggcggcttcggcgacatttttcgtgccgataatattgtttttgacggcttcttccggattatgttccattaacggcacatgtttatgggcggccgcatgatagacgacgtgcggctcgtattttttcatcaacgtaaagattttatctctgtcctgaatatcggcgatctccgcgtgaaaaagcacctctttgccgaagcgtgcggacagttcgttatgcaccgaataaatgctgttctccccgtggccgagaaggacgatttcatgcggaagaaacgagctgatctggcggcagatttcagaaccgatagagccgccggcgcccgtgaccagaatcgttttccctttgatgctgtcagaaattttgctcgtatcaagggtgaccggctttctgccgaggagatcttcggctttcacatccctgatgtgtccggcagcctgcgttccgagcaggatctcatcaaattgcggcatgattttaatatgggcgcccgtctgcacacattctttgtacagcgtctggagctcatgggtgcaaagagacggaatggcgatgatgatgtggtgaattctcagcctttgcaccgccggcataatgctttcttttccgccgatgacgggcaggcccatgattttgagcttatgcttcgtctgatcatcatcaataaaagccacaggcatgattccgagatcatttttctgcgtaagctgacggacgagcagcgttcctcccgcgcctgcgccgatgatcagcgcccgggaagagtcattttgcttcctgccgatcgtttctttcagcacgcgcgaaatcatccggcttcctccgatgaacaatagctgaaccatccagctgacggctaacagccggaacaaaatcgtgtggaacaccccgtattggacggcggctgtgacagctgcggacagcgtgatccccttcagcagatcaagcagctcgccaattcccgtatacgtccatacctgcttatactggtgaaacataaaagcgcatacatgatggctgatcagcatggtcacggcggtcagcagcaacgctccggagtcataaaagtgataagaatcctcaaaaaattgatatcctataacaacggaaagtaaaacgagatacgtatccaatgcaaaaatcattgaaagtcttctccggtaagtcaatctttcccctcctcatttatcggtttagctgatacggttttcgtaaaaacagacataacagctaagccgataacaatgcatcatcttaagataaattgggcatttaacccgtcctcacaccccgccaccgacgaccagcatctaaggcggcggaaaacgccgcccacagcagagccgagtgcctccgttgataaaggtaaggagacatcacctgcaccgctcaatacgagtagtgctctgtttttttgattttctttttattcagcagcgcccccaaaagctttgcctttgactgctggagcgcgtctttcgccttttggacggtatccattttcgtttttccgctcaagacgacgagaacgcttccatctgtctggttcgctaaaatctggccgtccgccaccgccaaaagcggaggtgaatcgaaaataaccagactgtaccggctgtacatctcctgaatcagctctcccatcgcctttgaagataaaagctcggccggattcggcggcgtcggcccgctcgttaagacgtaaaggttatcaatcagcgttttttgcaccgtttcgccgagggaagcgtttccgactaacacattcgtaaggccttgtacattttcaagctgataggtctcgtgtatcgtcggttttcgtaaatcggcatcgacaagcagcacctttttttcctgctgcgcaaataccgcggcaaggttggcggcgctgaatgactttccttctcccggaacggaggaagtgacgagaatagagcgcaaatgggtctgaacagaggagaactcaatatttgtccgaatggtgcgatattgttcagccaccaatgatttgtgatgtaaaacggatatttgagccagtccccttcttgatttcttttttctgaatcccaaacgcctcactccccgaaatgtttttcatcagaccgtgtctgctgatttttgatgtcatacacaacccctaaaacaggcaagtctgttttttcgctgagctgccgctcgcttttaacggtttcatcaagaaagtggagaaaaaacgcaagcgtcacacccgccatgagagccgcaccgaacgccatcatgatattcctgatgcgcgaaggcttgaccatcgggctttccgatgcttttgcctcggacaaaacaatgacgccttttatattcatcctgtcacggacttcttttttaaatgtcttcatcagcgtgttcgctatagcggcggcctgtttcgggttctcgtcctgcaccgctgcgttaatgatctctgaatcggtttcgctgcttgtcgtgatctttgcttttaaagcggatgccgtctcagaaagatgcagcttctgtttcactttctcaagcacaaccgggcttttcattatcgtttgaaacgtattgttgtaatgaagattcagctgaacgtcgctgagattcgaatttttttcaccgcttgtttcatgaatgagcacttgggtcgatgcctgataaacgggcgaaatcacccggaattggatgtatcccgtcatcagcgttacaactgctgtcatgataaaaatcagtaaaaatctgtgtttaataatgtcaaataactctttaaaactcatattctcattcatgtaattacagcctcatccttattgcatcaggcttaaacgcccccttctgttaatgattggattataaaagaaaaggtcgaaatttgaaaatttcaaattaagccatttagttctttttagagaacattatcatgattttcctcttatttactgcacttcccttataattttaaattttataaagaacgaaaaatttcttataatgaacaaaaaaatgccagtatacaggggagaattcagcacaatgattggaagaataattcgtttataccgcagaagaaaaggctactctattaatcagctagcagttgaagcaggtgtctctaaatcttatttaagcaagatagaacggggggttcactcaaatccgtccatccaatttctgaaaaaagtatccgccaccctgcaggtcgatctgacggagctttttgatgccgaaacgatgctgcatcacatgggaggcacggaagatgagtggcgcatccaccttgtgcaggccgtgcagtcgggcatgccgaaagaagaactgttcacctttacgaacaaactgactgaaaagcgcccggagcccgcatcctaccgtaacagaaaactgactgaatccaacattgaagaatggaaagcgctgatgcaggaagcaaaagaactcggcttgtccgttcaggaagtcagatcatttttagaacggaagcgttactgatgatatgctgatgaaagggcttttattcgcttcatgccttcatctctgtttataatgaaaagaaaaaaggggatgaaatcatgacaaaacttaccgttcaaacccgctgcggcgcactgaaaggaactgccggccgcggtgcccgcacatggaagggcataccgtacgcgaagccgcccgtcggagagctgagatttaaagcgccggagccgcccgcaccttgggacggcataaaacatgccgattcgttcgggccgatttgtccgcagccggatgatatgctgtccatatcgttttccggagatataccgcctcaatctgaagattgcctttacctcaacgttttcgcccccgattcagagggcgaaaaaaagcctgtcatggtatggatacacggcggggcattttatttaggtgccggaagcgaaccgctttacgacggatctgcccttgccgctgacggagatgtcattgtcgtgacactcaattacaggctcggaccgttaggctttttacatttgtcttctattcatgacgcgtattccgccaatatcgggctgctcgatcagatcgccgcgctgcgctgggtgagggacaatatctccgaatttggaggagacccggataacgtcacgatatttggtgaatcggcaggcggcatgagcatcgctgcgcttatggcaatgcctgacgcaaaaggcctgtttcataaagccattttagaaagcggcgcctctcatacgatgccggcggatatggcaaaagacatcgcggcggcatttattcatgaagccggcactgatcaattgcaggagctttccgttaatgacctgcttaagactgcggataaagtgcggcgctcactggatcaaaacatttttcagcttttgtttcagcccgccatcgatccggccacattgcctgcggaaccggtgaaagccatagcagacggggccgcagaaggcatacctatgatcatcggaaccaatcgtgatgaagcatatttgtttttcacccctgatacagacattcactccgagaaaaagcagcaagattatttgcattatcacctcggagaaaactgcaccgagcaagcggcagatttatatccgcattcattaaagggacaaatcgatatgatgacggatctgattttctggcggccggctgtcgctttcgcacaaggacagtcgcaacacgcaccggtctggatgtaccgctttgattggcatggcgaaacaccgccgtttcataaagccgttcacgctctggaattgccgtttgtgttcggaaactttgattctttgagaaagacgctgcaagagccgctcggtgatgacgcagaacagctttccaaacaaattcaatccgcatggctcgcttttgcaaaaaccggaaacccgaacacctctcacttcaattggcctgaatatgaaaccgattcacgcgaaactttgcttttcaacacggataccgctgtcgaaagtgatcccgattcagcaaaacgccgcatcctgtttcaagcataaaaaacgccaagggagccggctcccttggcgtttcattttcatcttacagacatcagtcagcttcgcagcatatccatttccgcattacccctgatatgttatattccaacccaatacgttaaccaaacattcataaaggagtttctatatggagaaatcaagtattatcggcacagctgccgttataatcggggcgcttattatcttagtttcatttatcttcctgcgcgacactgatttctatgccgtgaggtggataggggttgttatcatggttgcaggattttcatgcggtccggcccacaccatttcaaaacataaaaacaaacatgaaaaagaaacccggtaacctttactgggtttcgttcatacatttcattttatctcacttcataatgcaactccgcaaattgtttgtaacgcctgacatcagtcagcttcagtcctgtctcccggtctccgggtttaaacaaagaaattccgcggccgagcagaacgggggcgatctgaatgataaactcatcgacaagtttttcctccaaaaccgggtgcagcagatcactcccgccgacaatccaaatccgcttgccttcttggcgtttcaatgcatttataaaatcggcaggctcttcatgaataaaccgcacatgttcagtacgcccggtcaatgtccgcgaaaacacatagcattctttacctttgtacggaaattcctcaggcaataaaaccaatatttcctcgtatgtttttctgcccataatgatcgtatcgacagattcatagaaagcttcataatcggtgctgtcttcaccttcagttccgattaaccaatctaaagaatgattttcccgcgcaagatagccatctgcgctgacagctccgtaaaaaacgagctttctttgaccgctcataaaaatccctcccccttttttattataccttaaacatgcgggtgaaatgaaaaatgatagaatcgggtaaaaaccgccgttaccgggttttcgttttttcctgctttggagatgctgttaatatgccgtctatccatcttccggtaatcggcataaagaaatgaaggaagatcccgcctaaacaaacggttaataacgttccgatgcctaccggaccttttagcatcaaggccagtatgaaaaatatgaagtaaatgaccgttcttgaaaaaaagatgcttctcccggttaaatcacggacaattagcgttaaccgatcaaccgggatcggtgcgaaatttgtgtgcagataggttgcggttcctatccctatcacaactaaaccgattgcaaaacagcccgcctttccgtaccatagttcaggcgttatgactcgatgcagaaaaaaaagccacatatcaatcccgattcccgttatgaacgccgtaatcatccctgaaaattccggtctttgcctttttaacattgaattacagcaaattaacaggaaagcgatgatgatttcccagcttcccacggtaagccctgcatggacggacaatcccacaataagcgcatcaaaaggcgatgttccaagatctgattgaatcgtgacagaaataccaaaggtcaagatcatgattcctaaaacataaaaaacatatttcactttatcgtcctcattttcttattttatgttgcaaatacaacaaaattacggtatgtttactatacggtattttcattgcaaatacaacaaaattcagctggtatgataaatgaagaaaggagctgtatgaccctgagtattaaattaaaaaagtgcagccttaacgatataacagagctccgggagataagcattgaaacattcaatgatacatttaaagatcaaaattcacctgaaaatatgaaagcttatttggaaaatgcattccgctctgaacagctgaaaaaggaattatccaatccgtcttctcaattctattttgtttattatcatcatgaccttgcggggtatgtaaaagtcaacatgaacgaagcacagtcagaaaaaatgggggaagattctcttgagattgagagaatttatataagaaaaagccatcagaaacacgggcttggcaaatatctgctgaatgaagctgtgaaaatcgcaacagcacacaataaaaagaacatctggctgggcgtatgggaaaaaaacgaaaatgcaatcgccttttatcaaaaaatggggtttgtccaaaccggagaacactctttttatatgggggatgataaacaagtcgactttatcatgaccaaaaccctctcgtaaaaggatacaaaaaacccggccaagctgccgggttttttctcttattttaattttcccgcacggatatcatcggtcattccttcgtatggcgcttctgaaatcaatgtttcgttattgattcccgcattgttaagatacgtaatatccgcaaactcgggaacgacatatttcgggtacgtttcatatttctcacgtgactctttcatcacgtcaatgtaatcattttggtagcacaccgtgatttccggatgctcatgcacccatttcgggaagaaaataattccgtgcatccgtttttcattcggcataaagtttaaggaaacgtctgtgcctgtcggttcagtccatgacactttgtatacgccttctgtcagcttgacgatattcacttcctggtcgcgcacccaacggccgcctaccattccgctatgaatccgatagtcgatcgtatgatcatttttaatatagatttcatactcccagccgttttcatacgtgtaaatcatatggcttccgataaagttttccatgttgactcactctccatcttattattgaatttcataaatatctaaccgaatgtcatccggcaatctgaccgcagccccgataaacagccggtcctgcagatgctgatatgcctcattgcttgtttcaaacacaggcacagtgcggaaatacacgtgctcgggatcaatgatgcgtttcactgactcataaatgacttttttaaagaaggttcattcaaggacgtatcacctcccgagacaatatgtttgtttaaacatgtaactatttacatgattaattgtaacgctgttaaaatggactgtcaaataatgagctgtttccggttatgttttacagtgttcaataaaaaagacaagggcggcacatgccgaaacccttgtctttttcattaagctcatctataaaaaaacgcagacgagcgtcttcttagtaatcacaatctttatctctgcattctttctttctcacagcatctatagtgtgtcccataatcttgtcatttgctttatcataaataccgtcaaatttatttgatgtatcatcgttgtaatagccaaatacctctatcccgcccattggatctgtttcatatttatctttaaatgtaacgttatgtatgccttcataattcgctttgataaatttctccattcgttcttgagcaatctttatctcttcagcctgaacatttttatcattcatactcttcattataaaacctccggctgctattaagataatgaagataataatatattttttcacagaatcatccgtcccatcagttatgatgaagctcgcggaatggaaaaatggtggtgacatccgatgcatttagggtcttaagatttttctttaatgtccgcagaggatcatataagcggcaatccagagtacttctttattccagcgtctttttagtattcacattctttttcctgacattcgggtttctcttctgcatcgactgacgaaactcctatttcatcattcgttttgtcataaagtccgaaaaattctttttccttattaccattcaagtaccccttcaaggaaataccacccataggatttattttataattgttaatgtatgtaatccgctttatatttttgtaattagcttttatataactttccattttatttttcgcttggataaaaagttcttgttctgcttctttttaatcatggtggtacttcatgtagatacttcctgacgctatagttatcacaaatattagggcaattttgcatctcttcacaaactcatcctttcttagattaaatttatatcaacctcggggtgttgtacatgtctaaaaaacatcaacgtatcaagtatcagtgatcgagaatacttttttataagcgttagttatagttagatctaggttaaatgaagtgatgaaggagaaaggaattcaaatccagaaggaattggctgatttagttggttctactgaggctgcgataagcagatttaaaacaaatacaagatatgatatcacaacactattcattattaactgaggattaaatgtacctatggaagatttgttttatgtcgaggagatagagtaagagcaataaaacaaaattagctcagctcgattgagctggctaatttatcttgtacaaagcttatctttacattcttctttgggttcggcatcaaccgtatatgataatatttctttattgcctggatcatatagaccttcaaactctttttttccattcgtataacccttaatactaataccacccattggattaatatggtaatcatcggaaaaatggatattatccacatttttatagttcattgttaaaaacttttccatatgattctgggcttcttcgaataacgcaatctctttttccttctgatcatactgatgcttcataaaaagtcccccaactgctataattattaaaataaggataattatgtactttttctttttcatttggaaatcaaacccttcctataaataactgtcgttcttaagtaaacgaaatgagcgaaaacttgatatgaatatactttcagcatgtcaaaagcaaagctaaccaattcagaattcatcgcgattgttgctgacaagttaagattggaacttaaagcgagtaaaatgctgatctgacgttttcctgtcgttgagttgtcatgatatttgtacgcgtttaccgttaatatcggggatacctcgacaaatgagacggtagaggcgattgatctcaggaataggtttgaactgtatgagaaacatatcacgaattttgtaagataattaaacaaaataaatacccactcatcctgaggtgggtattttacctttcttcggcattgaccactgaaatacctatctccttgttcgttggatcatatataccggaaaattctttttctttattattatttatgtagcctgaaacttcaactccgcctgtcggatcgatattgtagtcttttgaaaagtgaacttcctgtacatttttatagtctttttttaagtaattcctcatatgatcttgcgcctcaatcacaagtttttcttcgtttttatgtttatcatattgatgcttcacgaaaaaacctcccactgctataattataacaattaggataataatgtattttctcatgcgtatcatcctttcggaactattttacaatataagaaaggtgatgtatatatgccaaaaggaaaagaaataaccgtctctgatgtcacagataaagaatattaccgtttgagtcaagcagcttacaattataaaatgttagccctgcatatgaaatataaaactccttataaaataagtaagacgtcatattggtacgttgagaaagtgaagcaggattctgatacgggtcttgatgcctttgtattctcaaaaggcatcaagtccaaaaacggaaaatggataaaatcaaaaaaccccgaaaacgtggtcgtcgcttttgcgggaaccgatatcggaaaagacccgatcaatgacggcgtaaaagcggacggcggcaatattgttttcggtaatgatccgcaaaaagaagtgtattatattgtaaaaaaagacgcggaggatacctcgaaaacactcggaaaatataatggaacgccctctcaagacgccatgctcacaaccggaaagtataagctgataacgaaaacatcgcaaatcgatcaagccgatcagctggtacgcagcgtaaagaaaaagtatgccggaacatcaacgattatttcaacaaccggccattcactcggcggcgctgaggccgaatacagcgcggtgaataatgatgtgtacgccgtcgcgtttaacagcccttccgtcgtgaaactgcacgatgaggaaacacagaaagacatcaacagcggcatatacgatccttacatccggtcaattatcaatccggacgacatggtcggggcgggttattggaacgaatatgaccgccacaacgggacaacgatttatacgaaaaacccctcactctcacagttcagccggaagcagcggcttgatgggaacttgaacgagcagatcggcaaaaatctcgcttatttctttactaccgtcattctgagaaatccggatacacacggcttaaatgaagcgaatttcatatttgaccgaaacggaaacatcacaaatccgaacggagatgagttagtcttcgataaaaatctcggcgctcttctgccggccggtgcgatcggaagcggagacgcgataaaagtaacgccgaaaaacgcaaagaagctggctgaaaaggtgcaggccatgactgaggatttgcggacgatgaaaaaagaagcgcagaacgcctatcaggagcacgatgaaaaaatcgccgagctgaaaacggaattttacggccaagtcggacacggcttgtttgatcagcttcaagcacaggacgtgaccaatacaattgaagatattgcgcaatcctacgataaaggaccgattttttacgacacacaggctgagcaggcgtttattgattctttgcaggcggcgatcacggaccttgaagagatcggcggattcttacataaaatagcggacgaatttcaggaaaaagaccagatgctcgcaaactggttaagatgatagaggtggatacataatgccgacattagacgaacttttagaacacaaggacgacccgatgaagaaaaggctgcagcggcagatgctgaaaaccgccatgacgcaggcagcggggacaaaactggaaacagtgcgccaaacgctgaaaccgacattcgaaatggacacattgaaagatgaattatatgaagtgtattcagcactattgaacagctttgaaggcaaggcgcaaaaagctcttgcgcagcggatcagtgaaagtgcgcggctgattgccggcaccgaacataacagagacacattcattaacagtttcaaaacaagataaaataaaaacctcgcagatttatcatctgcgaggtttttcctatcgtcttaactgagacgcgctcggagggattcgaacccccgacagacgtggtaccggaaaccaccgctctatccaactgagctacgagcgcacgttttttcaatcagatacctttatattataataaagaaacgcacagaaagcaactcttttttgattatacacaacaggattatgctgcacgaggacgctgcataatcctgcatcgtttaacggcattgattttcacaaaaaatgtatttcaggcggactgccctcggctcggtacatttccagccgcttcagaaaaagcgataatcacccgtttcagctttttttccaaatgtcctttaacgtccaataggtgaattcctcaacctttacggcgcctttctcagaaaacagctcaatccccaatctgccttcattcggatagatacggcttgtcatcgttgtttctccatgattggcgaatacttcaatcgaggatctgtcaataaagatacgcagcgccagcttgccgtttgcatccagccgcacccttctcacaccgtctttccccatcttggtgcaatcaagtgtcagctttttatccgttagattgtatgtcagcacaagttcttcttcgtcaaggccgcgaatcttaaaacctgccgtttcggcatcagaatcgtttacatcaaacacggctcggacttcaagcaggtcttcgggcgtctttgccaagtaactccctgaaaccgatcgtccggcacattcccgatattccattttccgcagctgcttggtttcttccacgggattcatcaaaagtttatgatcatcacgcaaagtcagttcccgcggcaaagtcagtgcaccgcaccatccgtccgcttttgtcggcatctcagattcccacatatccatccagccgatggcaattctgcgtcctttatcatctaataatgtttgcacggcgtaaaagtcatggccgtgatccagttctttaaaagcgccgtgtgtaaatttgtttgtttcattattatagtcaccgattaaatagccggtttgatgtaaattgttatatgaatcgccgtccgcctcgataccctggggcgaaatcagcaggacatgtttgccgcctaattcaaagaaatcaggacattcccacatataaccgagattaccgtcactttgggcgagaacccccgcgtattcccaatcacgcaaatcaggtgaacggtataaaacgacccgtccgacgttttcttttgaagagttgccgatgaccatataccaaacatcgcgatgcttccatactttcggatcgcggaaatgacgggcgctgtcttccggcggttccgtaataacagggttttcctgaagcttttcaaacacggttccatcttggctgacagcgatattttgagtctgatagaataggtctttctcttgatcaattatattatgtcctgtatagataagggctaatcttccatgatcatcgaccgcgcttcccgaaaaacagccgctttgatcgaattcgtcccccggagctaaggcaaccggcaggtgctcccaatgaatgagatctttactttttacatgtccccaatgcatcggcccccaatgctcatcatacggatgatgctgaaaaaagacgtggtattctcctttaaactgaataagcccgttcggatcattgatccaattcgcccgcggcataatatgataccccaatcgatatctttgtttcactttaccctcggcttccttcaaagcttcttccgcctgctgaattctgtccatttgtaacatcctctctatccgattttttgcagacgctggacacgcctgctgttttgtttcgggcccaataaagtaaatatggagatgacggtaaaaccaaagacgacgaatcccatgatgagataggtttgacggaaccccgcactgtcatataatcctcccgcaagcggcgacagaatcgacgcgcctgcctgagatgcgaattgaaaaccgacgagataaaggacggacgacagacgcgtatcaaaattggcggccaaatatttaaaaacggcgatcagcataatcggcaattccagtgcgtggatgagtttcattgatgaaatgcctacaggctcaactgcaattccggacccgacgatgcggaaagccattaaaaaccccgctaaaatcaaactgtttttcgctccgaacttattgacgataaaaggcgcaagaaacatcatgccggcctccaaaaacacctggaatgaattcagatagccgaatacttggttacccatcgacactgaaggaaacaaagacgcatagtagatcgggaactgctgatcataaacgccgtaaatgcaagtcaccccgataatgtacatcataaaaaaccagaaatcttttaataaaaagagccgccccacatcttttaaccggaccgattccgctctgtttttctcatgatcggtcatttctattttcacggacatgataatggccgttaatatgacggctgaaacagacgcgatccagaagttgatattgggattgatattgaaaagctgccctgcaaaaaatgcagccgccgcccagcccagcgagccccacattcttgattttccatactcgaaatcatacttacggctgaccttttcaatgtacgtttcaatcgcgcctattcccgccaaaaaagcggctcccaaatataagcctccgacaacggcgccaagaaagacgttgtattgtaaaagcggcccatagacgtagatataaaacggacccgtgaatatgagaagacagctgatcataaacaatatctttttcttcagccccaatttgtcagagataaaaccgtaaagaggctgcatgcacagggcaaatacggcgtttacagaaaagataatgcctgtcgctgatccgtttaaattgatttcctgccctaaccaaatcgcaaataaagaatagctggaagaccaagtaaaaaagaaaaagaagaaataagcactcagtttccaatacagactttttgagcttttcatttgcaccgctcctttaataggaccttttaatagtcattttgagccgcatacttccttcttcatattcatcacatacatgcgagctccgagtaagcgcttactttccgccgctgcttgattctttcactttattgccgccagccatctctccatacccgtcacttcccttcactccgtaaataaagcgctttcaaaaagaattgtatgtcaaccggtttcatatgtcaatcggttgacatatgattttctgattattccaatcaaacaaaacgcaccctctttatatgaaaacagaaacatggaatgtccttgcacatgtcagcctgattctctaaaataagtgcgtgacggaaattgtaagccatttcagtatgcaggagggcacgggaatgaagcctaacattcatgatgttgcgaaaatagcgggagtttcatctacaaccgtttcgcgggtattaaataaccgcggctatatcagcgaaaaaacaaaagaaaaagtgtacaaggcgatggaagaaatcaattactttccaaacgatctggcccgctctttattccgaaaacgaaccaatttaataggacttatcatcccaaactccagcaacccgtttttcggcgaactcgcctttcatattgaaagcatttgtacgtccatgggctacaaactgctgctttgcaacagtttacatcgaaaggataaggaagaaaaatatttggagatgctgataagaaaccaagtggacggcgtgatcgccgtgacttataaccggggaattctcaattatcacaagcagaatctgccgattgtcgccattgatcattacttatcggacacgattcccgtcgtcggctcagacaactatgacggcggaaaaaaggcggctgaactgctgattgaaaaagggtgccggcacatcgtccatctcaacggcccgattgaactcgaaacaccggcaaacctcagaagaaaagcatacgaagacgtcatgcatgaacacggacggaagcctattacatatgaagtacccttttatcagcattaccatgatattatttcaacattattcgatgaacagcctgacaccgacggaatttttgccagcgatgatatcatggcggctgccgtgatgaccgaggctaaaaaacgggggaaagacctcccgaatcaattaaaagtgatcggttatgacggcactgaaaccgttcaatcggttctgccggacttgacaaccatccagcagccgatcgaattgatttccaaaacagccatcgagattttagcaaaagaaattgaaggcgaatttgatgatttgccgctggaaacgtatttgccggtacggcttttggaaggacggacaacgtagtcagaccgttcagccgtatgtaccgacgcgactgcggtctattttgagcgctccggccatatcattttctcaaggctccggcgctgatcatcctcattttcactttgctgtttgaactttttgttttatgggaaaaatggtgttagaagaaaaggttggcattttggtcagcgttttgtttgacctttattgaccaaaaatgtatcatgtaaatacatacttacctaaaaggtgaaggaggagcattatgaatttaatacctacagtcattgaacaaacgaaccgcggagaaagagcttatgacatttactcccgtcttttgaaggaccgtattatcatgcttggatctgcgattgatgacaacgttgcgaactccatcgtgtcacagcttttattccttgaagcggaagaccctgaaaaagatatttccatttacattaacagccctggcggatcaatcactgccggtatggcaatctatgatacaatgcagttcattaaaccgaaagtatccacgatctgcatcggtatggccgcttctatgggagcatttttacttgcagccggagaaaaaggcaaacgttacgcgcttcctaacagtgaagttatgattcaccagccgcttggcggagcgcaaggacaggcgacagaaattgaaatcgccgcaaaacgcattctcttgcttcgcgacaaattaaacaaagtgcttgctgaacgtaccggccagccgcttgaagtcattgagcgcgatacagaccgcgacaacttcaaatcagctgatgaagctttagaatacggcttaatcgataaagtgctgacacgcaatacggaagaccagaagtaatgcccaaaaaacctgcaagagatgatgtctcttgcaggtttttttatgctttattcccattcaaaaaagtaatgaatgctttgacgacagataattctaacgctgaagaatcatacatgagccaagtatcgcgtatcacaggttcattatttttataggatagcgccaatgtgtataattcatcagaaggctgaagacagatttccggcacaacagaataaccgaggccgtttttcaccatctctttacaggtttcctgcctgtctacctccattgcaatgaaaggcggttcagtaaattggttattccaccatttttgaatcaaacttttcaaagaagcatcagtttgataataaatcatcggcaatttgggaaggtcctcactgttgatttcagtttttgaaataaggtacagcctctcttcattcagcagttgtttttctccttgccaatcataattccccctcataatcccaaggtgtacccccgaatgatgaagcagatccatcaccttcgcactccatcccgtattgacgtggaattgaacagacggatactgatcagaaaaccgttttagaatcgccgggagcttatactgagcaaaattgcttgagactcctaatctgagaaccccgctgacttcatggctcatattgagcatatcatccttcactcttctgaactcctgcagcatctctttcgaataatcaaccagatgttcaccttctgaagtgaactccatccctttttttcttttataaaaaaggcgcactccgaattgtgcttccaggtttttgagccgataacttaacgccggctgtgtcatatataatcgctctgccgccttcgtcatatttttttcttcgaataatgtaatgagcacaatccaatccttttcatccatatgaaatcccccaaaatatttttctgctataaaattttctcctattataaaagttttttatttaactttataaaaattatatgttttacttataatccttatttatcatacgatatcttccaaagggaccggtacctttttatccacacaaaatgatgtaaggatgagacagcatggaaaaagttcctgtaaccgttatgagaggcggcaccagcaaaggcgtttttattcttcaaaaagacatgccagacgatacaaacctatggagcgattttcttttagacattatggggagccctgacgagagacaaattgacggtctcggcggcggccattctctcacaagcaaggcagccattattaagaaatccgccagaaaggatgcagatgttgagtatacgtttgctcaggtcagtctgactgacaaatttaccgacttcaaaggcaattgcggaaatatctcttctgccgtaggcccttatgctattgagaaagggctcgttcaagctgaagagccggttacaaaagtcagaattttaaatacaaacactcaaaaagtgatcgcagcagaagtcgaagtcagaaatggaacatttcattaccaggggactgctctattccgggggttccaggtacagcttctcctatttatctttcatttcaccaggctgaaggagcggtgaccggtaagctgtttcccaccggtcagcctattgatgttctcgataccccgtatggaaatatctcggtatcgattattgattacgccaatccgcttgtctttgtaaaagcagaggacacggggcttaccggcttagaacttccggatgaatataccccggatatattggaaaagctcgaaatgatccgatcgattgcagccgagaaatgcagattcgctccgagacatgaggctgctgcaaaatcaccggccgtaccaaaactgacattaatctcatctccagcggattatatcgatacaaaagggataaagagacacgcagaagagatggatcttgtcattcgtatgatgtccatgcaaaaaccgcatcaagctttagccattacaggggcggtatgtacgactgccggcatgctattgcaagatacaatattatctgaattttcattctccgggagaacgatccgattggggcatccaagcggtattttaaaaaccgaggcagatgttgatccggatggaacaacgattaaagtagtacgcacagcaagaaaaatctctgaaggctatgtgtttactaaacaaagttacagcatgaatacgctcaatcacattggttaataccgtcttcagacaagtcaaagataaacggaggaatacgagatgatcaatgtaaatgcgtctaatcgattaaacagactgcctttttcaagggcccatcaagcagtgctcgttatcctttcattcgcttacttttttgattttatcgatttaaatacgttttcatatgcggcgccttcacttttaaaggaatggaacatatccactcatactatcgcttttattacatctgtctcctatttcggaatgtttatcggcgcctctgccggaggatggttttcagaccgtttcggaaggaaaaaaggtttaattctggttgtcacctttttctcttccttctccctcctctcttctctggcttggaacccagaaatactcggtgtttttagattttttacgagtttaggtatcggcgccacaacgattgtggcgagtacgtatatcagcgaatttttcccatccgcaactaaaggcaaataccaggcaatctgtattacaatcggcatatgcggaattcctgcggccggctgggtggctaaattggtcgtgccgtccgcctcttacggctggcggtttgtctttctattcggcgcggtcggtattttttttccgctgatcgccagaaaactggaagaatcaccgaaatggctggacacgaaaggaaaaagcgaacaagcacaccgcattctgcttgaactggaggcaaaagcagaaaatgaaaagggtgaactgcctgaaccagctccggctctgcaaagcagacaaaccgctgtaaaatccgttccatatcggacgctgtttcaaaagcctttagcaggaagaacttttgttttaatgacgatgtgggcagcttccaccattgcaattcaaggctttggcacgtgggttcccacccttctggtgaaagaaggcgtatcaatggatgagtctatcgtatacgtcactctgggaacgatcggtgccccgctgggcgctctcattgcggcgcaaatctctgaccgtgtggatcgaaagtgggccatttctgttttatcgttaattattatggcgcttggattcttttacggcatcaatcctttgccgatggtcattatcgtatgcggatttctcatgcatatgtttgagcgtactttcagttcgatcgcatatgcttatacgccggaattatatccggttgaagccagggcatctggaaatggcctcacttacggcgtaggacgccttgcaaatgtagccggtccctttgtcgtcagtttcctgtattcaggctacggatttttaagtgttttcttattctttacaggctgctggtttctttgtgcactgacagtcggtatatttggaatcggttcaaaaaaacaaaagatgcagcaggatgatttcatatcggaagaaactttcgtgcaacaaaagttgtaaacgcatacagtctggaaaccgcaaaacatccatctcctctgaggaaatggatgttcttctttcaaccccaacagcagtctcattcgcctcttattctcagacatatctcttattacgaagaaaggcgtggtacgcatgagaaggagaaaagaactttccgtcagaatgaattagatgcagccgccgaaacatatttcagaccgctgccttacaattcacgccatttcttatctaaaatcgggtatgtataccgattcatctgctcaatcagctcatccggccgggaggaactatgtatcagctttaaatgagactcattcgaaaatccttcctggatgctgtacttgaccatcttcatcatcggctcaaaatacccgttcacattgtacagtccgatcggtttttgatgaatgccgatttgcgcccagcacagcacttcaaataactcttcatatgttccgaaaccgccgggcatggcaatgtacccgtcggcaagttcactcattttcgctttccgctcatgcatgccgctgacttcaatcagctccgtcagattctgatgaacaatctctccgctgaaaagcccgctcggcatgacgccgacagcttttccgccgcctgccattaacgcatcagcgacggttcccatcagaccgacccgtgaaccgccgtaaacaaggccgattccctgctccgccatatattcacccagttcggccgctttgcgtttgtactcttcatttacccccgggtttgaccccgcaaatacacaaatggttttcattttttcatctccgcatctatatatgtacatcaataaatcaaaatacactatatattgtcccatctctatatgataatatcaataagaatcatacaggacataaggagtgtttcacatgcagatggctgaagcagaacaatggacgaaagatttttacgaaaaacgaggatggacggcgtacgggccatttatcagaatcggctttttaatggaagaagcgggtgagctcgcccgggcggtaagagcatatgaaatcggcagagaccggccggatgaaaaggacgcaacccaggctgaacgcaggcaggagctgattgaagaaatgggtgacgtcctcggaaatctggctatccttgccgataagtacggaatcacgttagaagatgcgatgaaagcccatcaggaaaaactgatcaagcgctttgaaaccgaataaaaacacggcccgtccgctttttcatggacaggccgtatctgaatttatcccgttatctcgtcctgatgctcaaagaaatgctgtttcccgattttatgaaacagccccgtcttccggatcagctctctcggctgtgattgcaatccgacgatcatcaatctcccgttatgccgtttgatccggttcatcacattccccagcaccgcttctgcggaggtatccatgtaatgcacattattcatcagcagaataagcgtcttcggcttttcctgaagcctctccagcagcgatgattccagtgaatcaattgaaccgaaaaacagcggcccttcaatggaatatgtgctgacggacgaatcatttttaaccgatttgaccgcggcatgcggtgttttaatgcttgttgattcgctcatttttctgataaagaaaacaaaagcgagcacaagaccggcagaaacgccgataattaaatcaaacagaaccgtcagcaaaaaggttgccgccagtacgaatgaatcagtgtttttcagccgcatcatattggcgacttccctccgctcactcatgttccaagccacaaccatcaataccggcgccatgcttgccagcggtacgtgaacggcaagcggggcgaagacgagcaggacgaggaggacggtgactccgtggacaacaccggaaatcggagaaactgcgccgtttttaatatttgttgcggtccgcgcaatcgctcccgttgccggtatgccgccgaaaagcggcgctgccatattggcgatgccctgcccgacaagctccctattgctgtcatgccgtgatcctttcatattgtccgcgaccatcgccgataatatggattcaagtccgccgagaagcgcaatgatcagagccgagggaaacatcatcaccatgttatcaattgagaaatccggaagctggaaagccggaagctgccgcggaatttctccgtaagcagaaccgattgtcgccattttgtcaggaaaaaacacgaccgcagcggctgtagagacaagcagggccacaagcgcgccgggaatcttcggcatcagcctggctgataacagcaaaatggccaaagcaattcccgcgatgaggatgctgtacaaattaaaggttccgatcttcttgcctatttccgcaatgttgaggataaagctttcatgcttttggatatcgcgcagaccgagaaaatgggcaatctgctccgagaaaatcagcaccgcgatcccggccgtaaatccgacgatcaccggcttcggcacgaatttcataatctttccgagcttaaatacgccaaacaggacgagcatgacgcctgccataaaaccggctacaagtaaattctcaaaaccatactgcatcacaatggcaaataaaatgggaacaaacgcccctgtaggcccgccgatctgatatttagagccgcccaacagcgaaatcagaattccggccacaataacggtgtaaagcccgtattccggaccgacccccgaggcgatggcaaaggccatccccagtggaatcgctacaattccgaccacaattcccgcgattaggtctttctgaaatttctgcaaattgtatccctgatatctgccggtaaattgcatcgtcagctgcatcctcctttgactgtttcataaccgtcaacgactacatccagcgtccccgttcccggatcgatcaccagcccgtgcaccggcacctcttcaggcaagagcggatgatgcctgaccatattcacgctgtgggccacgctttcttcgacgctgtgaaaaccggtcagccatgtttccaaatcgactcccgcatgctgcagaaggctgagacatttgtcctccaccccgcgctcttttgctttatttaatatggaagccgcatttaatcccgacattccgcactcgcggtgacctatgatgcagacttcctctgcctgcagttcataaacggcaaccaaaatgctccgcatgacacttccaaatgggtgagaaacaatggctcccgcgttttttatgattttggcatcgccgtttctgagtcccatcgcctgcggcagaagctccgtcagccttgtatccatacaggatacgatgacaagcttttttttcgggaattttgtcgtttggtaaggttcatatttcctttcttggacaaactgctggttgtgctccaaaatgcttgataaagaaaccatttttctattcatctcccatccgattgtattgcaagccttcttacccagcttacagtaaggaattatagcacagaaaaaggcctcaaaagcgctttcaaaaaaagacacgataatttgactgtaaattcagattatattcatttatatctttcaaaaataataaaatttatctttacaccaacctataaagcttttgaaaacagcggttccgctcattttgccttcagaaatataggcggattctgttattgtttggagaaatcaagcatgtacattcctttttctttcattttaagttcaaaagaaccagaaatttatcgtaatgcgtttgattatttctcacgttaccgcttctcttatataataaaatagagaagaaagacaaaggaggagaagcccgttgaaaccctatgtattcatcgcgaaaccgataccgcccgaagtcgaacaaatgatagacgagcattgccgctatgacatctggaaagaagataccattccaaaagagaaactgtacgaaaaaatgaaagatgctgaagggctgctgacatccggaacggcgattgacagtgatttgctggatcacgcgccgaagctgaaggtcgtcagcaataattcagtcggctatgataattttaatattaaagaaatgaaaaggcgcggggttgtcggcacgcatacaccgtacaccttagatgacactgtcgctgatctggctttttcattaattctgtcttccgccagacgggttgccgaattggatcgattcgtccgcgccggcaaatggggaaccgttgaggaggaatctcttttcggtatggatgtccaccatcagacattaggaattatcggcatgggcagaatcggtgaacaagctgccaaacgggcaaaattcggcttcgatatggacgtgctgtattataaccgcagcagaaaaccggatgccgagaaggaactcggggttacatataccgacttagatacactgctgaaaacatcagactttgtgcttttaattaccccgcttactgacgaaacatatcatatgatgggagagagggaatttaaattgatgaaagatacggcatgtttcgtcaatatttcccggggaaagacagttgatgagaaagcgctcatccgcgcattgcaagagggctggataaaaggcgccggtttagatgtgtttgaaaaagagccgatcgccgaagataatccgctcctgcagctggaaaacgtcacattgcttccgcatatcgggtcagcaaccgcaaaaatccgcttgaatatgttcaagcaagccgcacagaacatgattgacgccgtatacggaaaaacaccgaaaaacctcacgaaggaatttcaatgagatgaaaaatcccggccgtttcagccggggtttatttttcgctagatcaaaagtactattttaaaattctttctattcctttctcttgatgctgatacaatgaaaaggaatcagcttcacatgataaaaatgggaggtattgctttgaaaaaacgattatcgtggatttccgtttgtttgctggtgctgttctccgcggcggggatgctgttttcaacggctgccaagacggatacatcttctcacaaggcgcacactgaagcacaggttatcaacacgtttgacggggttgcggattatcttcagacctatcacaagcttcctgataactacattacaaaatcagaagcacaggccctcggctgggtggcatcaaaggggaatctggcggacgtcgccccggggaaaagcatcggcggggacatcttctcaaacagggaaggcaaactccctgtaaaaagcggacggacgtggcgtgaagcggatattaactatacatcaggcttcagaaattcagaccggattctttactcaagcgactggctgatttataagacgacagaccactatcaaacctttacaaaaatgagataaacacatacaaaaaacggcttccctgcggaggccgtttttttgcagagaatctgcaagcttcatataaaatgagcagtaaatttttcttcaaactctgagcggtctattctgctgttttccgccgtgccatcgtgtttttttattgttatattgcgttcagacagaaccatgtgcccttccggtgtccgcttagaagcaagcaggcgtttgttgaaaggagaacgttcatgttcaaagattgtttgtttcatagacttgaggtccttttcatcgatttcttcaagcgaaaatgcgtagcctgtctgccagccgtcccctttgttcatttcaagcacgtatgtcccgaattccgtctcttctatcctcacgcggaacgctccggccgctgataccgtctcgtctcccgacatcggcacaggctgcatggcgagattgaggccgaagcctgcatcagcgatgtactcatttcccccggcggaaagaagtacggccgcatgtgtgccgggcagcgcccagccgtttttccagaccgttccgcggatcaatttgacatcaaatccggcatctttcaggatgaaataaagcagtccgttcaagtcataacaaagaccgccgtgaggttccttcaccatgtgccgccacagtccttctttcgtgacgtcatattcttttttggacaaaacggcgcggttttcaaacggaaaccgatacgcgagcgcctttaaaaactccggcaggttgctgaaatcgagggaatccttttcccagcctatcgtttgataacaatctttcagaaactcattcatcgttccgtccccttacaaagtgtttacacttcttcctgcacataagcggacaacttttccagcgcttccttttcatcgtcgccttcagcgatcagagtgacttccgtccccgtactgaccgccagactcattaatcccataatgcttttggcattcactttcttgccgtttttctcaagaaacacatctgatgcaaaacgatttgcctcctgtacaaacaatgcagcggggcgcgcctgcaatcccgtctttaaacgcacttccactttcccctgaaccataagatctccccttttctgtacggttatttcaaagtgatgctttgtcctgtacgcagctgttctgcgatttcatcgagctttctcagcctgtgattgatgccggatttgctgattttcccgcttgcaaccatttcccccagttctttcagcgtgacctcctgataatcaatccgcagctgcgcaatttcgcgaagcttttccggcagcgcttcaagaccgatccgttcatcaatgtatttaatattttccacctgtctgagagaagccccgatggttttgtttaagtttgctgtttcacaattgacgaggcggttcactgagtttctcatatctctgacaatccgcacatcttcaaagcgcagcagtgaattgtgagcgccgatgacattcagaaattcagtgattttttccgcctcttttaaatacgtaatatagccttttttccgttcaagcgttttgctgttcagatgaaaatcattcagcagggcgcataatgaatcgttatgttccttataaagcgagaagatttccaagtggtacgacgatgtttcgggattattcacagatcctcccgccaaaaacgcccctctcatataagaacgtttgcagcaccgtttcgccaccagttcctcagaaatattccgttcaaatacaaagttctccccgaggattttcaattcctctaaaatcagctttgcattttcagaaaagcgcacaatataaacattattttttttcagccgcattttttttctgactaacagttcgaccgatacatcatattgtttcttcagcaatgtataaatgcggcgggcaatcgccgcattttcggtttgaacgtcaagcacgagatggcggtttgaaaatgacagggaaccgttcatccgaatcagcgcggacagctccgccttggcgcagcagtccttcacttccagattcgtcagttctttttttgtttccgatgcaaatgacatattagccacctcatttcaaaaggcctctagtcccttaataaatcgacaagaagagaagccactttatgtgtatcgtgacggattacgccatttttatacgtgataatctgatccctgatgacctcaagccccatggatttcagcttttcaacattgaagtcgacgggccgggccagctctttcgcatatttgcttttgatttcgtcagggatctcctcattgttgattaagatcgtgtcgataaacggctgctccatatgatcgttcagcgccttgacatggtcggccgcgctgtattgaagcgtctcgccgggctgtgtcatgacgttgcatatatatacttttttggccgcggccttgacgacttcctctccgattttcggcacgagcagattcggaagaatgcttgtgtacaggcttcccggaccgataatgattaaatcggcctgacggatgacgtcaatcgtttccggcagcggatcaattttttcaggcgtaagaaacacccgtttaattcgctggccgtaagaagggattgtcgattctccggagacgacctgcccgtcctccatttcagcgtgaagaacgacactggtgttggcagccggcagcactctgccgcggacattcagcaccttgctcatttcggtgacagcgtgaaagaaatcaccggttatatttgtcatcgctgccaaaatcaaattgccgagcgaatgtccggttaagtcgcttcctttgttgaaacggtgctgaaacagattttcaacgagcggctcaacatctgacaaagcagccagtacgttacggatgtcacccggcggcggaatttgaagttcatcccgcagacggcctgaacttccgccgtcatcagcaactgtcacaatcgccgtaatatcaacgggcttatgctttaacccccgaagcagcacggacagacccgttccgccgccgaagattgcgattttcggcttcttattcatttccggcttctcttttcaatgtcccggtgagtgacatgagtatagaaatcttttttaaaatagtcagccaaatactcagcgagcgtgacggagcggtgctggccgcccgtacagccgatcgcgatgacaagctggcttttaccttcccgcttataagacggaagcataaagccgagcagatcaacaagcttttcaataaacttttgtgtttcgttccacttcatcacataggatgacacttcctcatctttccccgtaagcggcctcatgctttcaatgtagaatggattcggcagaaaccttacatcaaacacgaggtcggcatctatcggaagcccgtatttgaaaccgaatgacatcacgttcactgtaaatgtttcaccttggttcgtggcgaaatgcgccacgattttttcacgcagatcacgcggtttcatatccgatgtgtcatagatcagctgagagcgccctttcaattcttcaagcagctggcgttccagcgcgattccttcaagaggaagcccggtagcggccagcgggtgagaacgcctcgtttctttgtatctcgtcacaaggatggaatccttagcgtctaaaaagagaatgcgcggtgtaatccacggattttccgccatttcatccagcgcctcaatcagcctgtcaaaaaattcacgtccccgcagatccatgacaagcgcgaccttgctcatttttgaacttgattctttcatcagctccaaaaatttcggcagcaaggaaggcggcagattgtcgacgcaaaaatagccgagatcctcaaagctttgaatggcgacggttttccccgctccagacattcccgtaatgatgacgagctgaatatcatggttttcattcatactcatctttctcccccctgcggtctttcttttatttgataagctgcggatctaaacgatagctgagcagctcgaagtccggcgtatacgtaaaggtgccgtgcaaaagcccttggcccttgatcataaaatcaaggatatgcccgtctccgggggccatcggaaggctgtggatatcttttacgtcatgccacttcagaacgccttcctctgattcagcgacattccgccccgtgtaggagtcggcgacgaaagtaaacatcatccactctgacacgatttgttcctgttccttaataataaaggtaaacacgccttttaactgcggatttagtatataaatgcccgtctcttctctgtactctctgatgacggaatctctgacggattcgccgctttccatcttcccgccgggcgcgacccaccagccccgtctcggcttttggagaaggagaacctgatcatctgtctgcagcacacaatttgtcactctttgcacaagtacgtcacctaaccttctcaacaaatcatcgtctcttcattataccgtttcggcatgtctctcacaatgcagagacaccgacatccttttcttttatttgacagaaaacaaaaaatcgcaaaaaaagggcacggatactggaatccgtgccaaagtgtattcattaaaaagggggtcaattactacattcatcttaaaacatcagtatttcacccgtgttacagcgtaattaaaacacagtaacgattcaaaaactgaacattacagtgattatttaacggttttgagcgtttcctcaagctcttccacataatgctgaacgctttgagccgcaatacttccgtcgcctgtcgccgttacgatctggcggagcgttttttcacggatgtctcccgcggcgaaaatgcctgggacttttgtctccatttgggcatttgtttcaatgtagccttcttcatttgtgatgcccaagttttcgaacggtttagaaagcggaagcataccgatataaataaagacgccgtcagctttgaattcttcctcttctcccgtcacggtatccacaagagtaagtctgccgacttttccgttttcctcatggatttcttttacggttttgttccatttgaagtcaattttctcattgtcaaaggcacgcgcctgaagaatgctttgcgcacgcaatttgtcacgtctgtgaacgatggtgacttttgaagcgaagcgtgtcagatagacgccttcttcaacggcggagtctccgccgccgacaacgacaagctctttatttttaaagaacgcgccgtcacaaaccgcgcagtacgatacgccgcggccgcccagttctttttcgccgggaacgccgatctttttgtattccgctccggcagaaatgacgatggcgcgcgctttatattcttttgaaccggctttgaccgttttatattctttaccgtccacgatttctttaatatcgccgtacgcatattccgcaccgaattttttcgcatgttcaaacattttattagaaagttcagggccgagaatgctttcaaaacccggatagttttcaacatcctccgtgttggccatctggccgcccggaattcctctttcgatcattaatgtggataagttcgctcgtgatgtgtaaacagcagcggtcatccccgccggacccgcgccgataatgatcacatcataaattttttcttctgacaccatgattcactccttttcgaaatggggcgcaccctatatgactaagaatccccatcaatcgtattccttacccatatcctattaaatctgagggcaattcgctatttttttgctcatttttctgagaaaccgtgattagggagctcctgagcgggtatacaaataaagaaagagccttccgggatagaaggcccttgtcttattcattattgcacgacacgtcttacattgccgttgaatgctttcttccagtaagggttgctcatagaatcaatggatacaccgtgtgatgtattatcgttcaggaacgttccgttacctaagtagatgccgacgtggccgtttgttttatacgtgttgaagaatactaagtctccgcgtttcatgtcagacgcgcttactgctttacctcttccgattaatgtatctgtgtttgtgccgcttgcaggtccgagattaacgcctgcgttagcataagcccagcgtacgaatgaagagcagtcaaagatacggttgtcaatatcggattgagtgcgtccgccgccgaatttatacggagattgacccacaaggcttgatcctacgctgatcgcgccttcaataccgcctgaatttgaaataacagatccgccgtcagaatcatctgaaccgccgctgttatgagatgatccgcctgaagtgctcttcggtttgcttgagctgtcagatgaatcagatgatgttgaaacagccgcttttttcacagttttaaccgccggtgccggctggctgtcatctttttggttttggtcttcagaagctttttgcgcttcttcctgttttttgatcagggcagccgctgcagcctgctcagctttaatgcgcttctgctctttttcagtgtcagctttttggtttgcaagctgtgacgcttcttttttcagatcagagatagcggaagccgcttttttctgaccgtttttcgcttcgtcgaaaagcttgtctttctgatcaagctgtttgttcaggtctttttgcatagactcgagtttcgcaagatcatcttgaacttttttcagcttcacgttaagttcagcctctgcgtcttcgagtttcgctttatcctgctcctgctgtttgatcaggtctttatccgcatcaacgatagaagatactgcagtcgcacgggaaatgaagtctccgaagcttgtcgcccctaaaagtacatctatgtatccttgagaaccgccgttttcctgtaaagaacgaacgcgttttttcaggatttcattgcgtttttcaatacgcgcttctgtttctttgatttcttttttcaaatcagcgatctgctttttcgttttttcgttttcagcttttttatcttcgattttattgcttgtatccaacgctttagcgttaatgtctttcagttctttttcaatcttagcctgcttgtcctgaagcttggacaattctctttcttttgcttcaaggcttgaagccacctcagattgcttgctttcaattttcgcttttttgctgtctaatgtttccgccgatgcagtttttgtaaacgggatcaaaaaactgcttgtcccgatgacggaagccaaaccaagtgttaataaactctttttcactttttctttcctcccttttactttaaacctgttctcatttggaattctattatgaacatcaaagttacgctccctcacatgcccgtgaggctgatgatttttatgtacgattctttgaatctggttaattggtatagattatacagcacatgtaaaataaactaatctcttatgtacgagactcattataccatcatgtttcgacaatttttattacagttatatttcaatgtgattgcaaatctcatattttgcaaaataaacggtgattacggcctgatttcgattcaaaaagcaaaaaaatacgtatgaatacctcttttttcggcggtaaagttctgttttgcccctttataataaaaaaaagaaccgactctttatatagaaagaatcggttttattctaatatatcatctatttgtctgatgtatttcgaaagggttgccggggttataccgtaaacggcggccgtttcttttttcgtcgttttttcgccgtttgcttctttccatacgtatgcgatggctgcggcccatgcccgctcattctgtacggcagcggcggcgcggatgtgctgaatgacgtgaaaaacccagcagctcatgacgtcagtttttaaactgtcggcttccgctttctccagaagcttgaccgtccgatacgtgaacagcgcgtcaccggagacgcctgaagcgcctttttcaccggaaagcagcagtctgacgaaatcttgttcaaacggtgaaacggcgcgttttgccgtcagaactttttcaagctggttccgctctccttcagcgctgctgatataataggcggcaagccgctgttcaagtgaagcaggcagcggttcctgccgctccgcccaaggcgcgggccggtctgattcgggaaattcggcttcggcctttttccaaatggtttccgcaaattctgtgcggcctgtcccgtaggctgaggcggcaagccagtaataaaacgtttcgtcgccttcgaacccgcttttgtaaagagaacggagccatttataaccgagatcatgtctgccgacaagcgcaagcgtcgcccccagcttatagcgctgttcgaataaaatcggatacacgttggcgagttttccgctcaattctccgactttttcatcttccctctcgtaatagcagaatacaaggaggttgcacagggcatggagattgccttcatttttctcaagcacttcgaataccgtctgtttcgcttttgtaacattgcctgagtaaaagtaagcgagcgccaggttgttgtatgcagaccaaagctcggggtaatcggccgtaatctcttcaagcatgacaaccgcttcatgaagctggccgctctcaagaagcgtttttgcccggtcctgcctgatcagcagctcatcctggtcatagagcgattcgttttcacccgcttcgccgaaatccaaaagctccatcagattttcaatctcttcgctgaattccccgtccggatcggcatctgaataagcctccgcttctttgtatgcttcctgaaagagccccaaatgcgcgaaattattcgctttaaaataatgacactcgggcatttcttctttcaggttcaccaaaataaagtcgaacagctcatttgactgctggtagtggcccatttcagaataaatgacggccagccgtgacagcatttcggaatcattcggctcgagatggacggcccgctgaatcagtttgctggcccgttttaaattccgctctttatatgcttttaagcctttatgaaaaaaatattgtccatcctgaagcagctggacaatttgcgcgtgctttttctgttcagaagtgtgttttcccacaaatatcctccgttttatacgtattaccgtcagtagtataccataaaacggtttcgcctcaatagttcaaaagacaggatcggcttcgttttttactggctggttcgaccagattttagctgtttttttcacgaggctcggctggaagaatgacgcggaaaagggttccttcgccgcgcttgctctcaacctctatcgaaccgccgtgcagctctgcgattttttgggcgatggacaggccgagcccgcttccccctgcgtttctcgccttatccgctttataaaaccgttcaaatacccgctccgcctgttcaggctccattccgattccgtcgtcggcgatttcgacagccgccgctcccggcagatcaacaattttaacggaaatgcggccgccttcaccggtaaatttcacggcattgtgaatcagattcatccatacttggctgagcagcgcttcatctccgtacacatacgactcctgtaaatcaatgagaaactcaatctgtttggcggaccattcaggctcacaggtcaatatggtgcgccgcagctgtttgtcaatgcggaacggttttttttgtatcggttcggtttggcgttcaagcgcagtgagcttcagcagattttcactgatttttgataatcgttctgtttctgtctcgatgatgtgtaaatagcgcccccgctcctcatatgataaatccggttttttcaggaggtgcgcgtagccctttaatgaagtaagcggggtttggatttcatgggaaacgttcgaaataaattcttgtttcagcttttccatttcactcagttccgcggcgagtgtcgacagttcatcagccaatttcgtcacggggtggtcccgttcaatcttctccattttcctggaggcggccgctgtgaagttgccgctcgacatttgcttgatcgtggcggtcagtgaatcccagatcgcatgatgtctttcacgtgctgactttgaaaagataaacatcgttataaacagcaggccgaaaacaagccagagcgtcagaatctgctcggcgtacggcacaagcaaaatcggccatatgagaccgaatccctgaacgatcagatgagccgccagccataagaatgcggtgacggtgagaaggatgatgatttttccagccgttctgaagatccgtttcattctgtcaccacaaaccgatacccgagcccccgcaccgtatggatagcaaacggatagtccttttccggaaaccgttccctcagccttttaacatgcacatcaaccgtccgctcgtcaccttcataatcaaagccccaaatatcttctattaattgttctcttgaaaacgtcttattcggataaccggcgagcttaaataaaagctcaaattcacgccggggcagcgtcaatcccgctccgccgccgcgcgttacggtgcgggattgcttatctaatgtgacatttccgatggtcagcagtttttcagcggtgatccggtaccgtttcagcaatgctttgacccttgcttccagttcaagcggctcaaacggtttgacgagataatcatccgctccggaagtaaaaccttgcactttgtccagcgtttcgccttttgccgtcagcatcaaaatcggaatgtccgtaaagctgcggacggcttcactgacttcaaacccgtccattttcggcatcatcacatccagtatgatgagatcaataggtgctgattcgatcagccgcaccgccgcttccccgtcttccgcttctgcgacgtcaaagccgctctgctccatcatgagtcggacaagctcacggatatggcggtcgtcatccgcaaccaatatgacagccataaaaatccctccttctgcttttttgcctgtcttcttttaatgaatcgacatgatgtctattaaccatcttattttttcattgtctcctgtatcgacagacactttttttgtatggcggatcatttcctccgtcacttctttcattacgccttgatcagtatcttcacgagactcccagcgcaaaggaacattgtatatctgaatggtgccgtcaccattgctgctgtaagtgactgacccatcgactaaccgggagcctgctaactgcgtaacatcttcgggatagcgggcgctcgtatgatcgtcagggttgacgagtgctccggccggaatgcggcgaacgttcaattcatctatctgctgattttccccaagctgcagccagatgcgggcatattcaatttgcagaggagaataatctgccgacaggcttttgtccgcagagatgtgatgtgaatctttgtttactggttcttttttttctgccgctgatgctgtttcagccttgttgatgccgctgctttctccggccggacttgaagaatggctcggctcttcatcgttaccgtccgtacacccggcagtcatgaatacgagcagtaaggccgcgtgccaataaaaaatctttgtgcgttttttcataatttaacccccgctttctatgaagagaactccggctgcaaaataaaaagcagctttttcagctgctttctattcataaagtcttgctttacacagctttgttttctaagtcggcattcagcttcagctgctgctccgcaaaatcgcggtacagcgaatgggatgccattaattcatggtgtgtgccccgtccggtgatttcaccctgttcgacaaagagaagctgatctgcatccacaaccgtggataaacgatgggcgatcacgatcgtggtgcggccttccattagaacttccagcgcctgctgcacccatttttcagattggctgtccagacttgatgtcgcttcatcaagcatcagaatgctcgggttgcgaaggagcgctctggcaatggcgatgcgctggcgctgtccgcctgacagcataattccccgctcaccgacctctgtttcaaatttcttcggtaagtcttcaataaattgcagggcgtaggccatgtcagccgcttgcctcagttcctcatcagtcacctcgcgttttaatccgtagcagatattgtcgcggatggtgcctgacattaacgggctttcttgcgacacgtagccgatatgctcccgccatgactcaagggaatacgcatcaatcggttcatttccgagcaggatgctgcccgcagtcgggttgtagaatcgttcaagcagcttaaataacgttgttttcccgccgccgctcggtccgacgatcgcggtgactttgccggcctcaatcgtagccgtaatgtcttttaagatggtttgatctgttttgtagccgaatgagacttgttcgagcttaatcggctgatccgcgttttcaatggcttttccgatttggatatcttcttctttttctgcaagaatatgaatcatccgttccgttgcgccgacggatttttgaagctgtgtgaaaaatgaagtgatctggcccatcggcataatgatctgaaacaaatacaggataaaggcaacgagtgcgccggctgtcaattcaccggatgacacctgcatcccgccgtacccgatgacagcgaccagcgccgccattaatacaagtgtaataagcgggcctacgagcgactgcaccttcgcttcacgcagcccgagtttaaagagcgccatgatgcctgcttttccgcgtccgtattccgcttcttcagcgtttgacgcttttacaagcctgatttccgggaggatgtggtttaataatccggtgaatctcgccgtttcatcctgtgtttcccgagaaattttaaacattttccggccgatcggcactaaaatcaccgcagccagcggcacgacgatcagcacgagcaatgtgagcttccagttcatgaaaaataagatcgtcagtgacccgataacggaaatgattccggtaataaatccgctgatattgtttgtgatcagctcttttaccaccattgtgtcattggtgacacggctgatcgtttctcccgtggcgtttttgtcaaaataagagacgggcagtttaattaatttctgccacaacaaatcacgcagtcccgagatgattttctggccgctgtagttcagggcgtaggtggcgtaggcgcttaatgcggcctgtacgatgaacacggctgcgatgattccgatttgcacgcctgacagcgacgacacggaaaagccgtcaacgagctgctttgtcaacagcggaatcagcaggctgacgagcgttgtcacaatactgagagacagcgcgaaggccagcataccgtatgatggttttgtttttttgactaatgaaaagaatgagctgaatttcccttttggttttggttgtttattcggcatatgttttcctcctatatcactgtttatactataacggatgtgcatgaacggaatatgaacaaaacgtatatttttgataaaaaccaaaataaactctattagtcaatattatcaaattcatctgcctacggttgcggaaataaggaatattttattgaatgtttaagtttgacagaataaaaacctcacgggtctctccgcgaggtttgttttactcagatgcagaatggcgtttcgcaaggacgtcaagcacgtcatccaaaggaagcgactgctcacgcagaagaacgagcaaatgatacagcaaatccgccgcttcccattttaattcttcatggtcgcggttttttgcggcgataataacctctgcggcttcctcaccgacttttttgaggattttatcgacgccttcccgaaacaggtacgttgtgtaggctccgtcaggcatctccgcctgccgtttggcgatcacgctttccagttcatttaagatgccgaaacgatcctgcgcgtctgctttttccgtggaaaaacagctgtagcttcccttatggcatgcgggtcctgagggctccgcaagcacgacgagggcatcttgatcgcaatcataacggatggctttcaccttttgggtattccccgatgtcgctcctttatgccacagctccccgcgtgaacggctgtaaaaccaggtttctttcgtttctatcgttttttcataggattctcggttcatataagccagtgtcagcacttctttgcttgccgcatcctgtatgatggcgggtatcagtccggcctcgtcaaaccgcagttcatctgcctgtttcatctcacattcaccccgtgtttcttcatataatctttcacttcttttatagatgtctctttgtaatggaaaatagaagctgcaagcgcggcgtccgcttcaccgactgtgaaggcttcaagcatatggcgcgcgctgccggctccccctgacgcaatgacgggcaccgggacggcacgtgagacaagctgtgtgagcgtatgattaaagcctgttttttcaccgtctgcgtccatgcttgtcagcaggatttcacccgctccccggctgacggcttcttttgcccaggccgtgacttcccgctcggttttctgtctgccgccgtgtgtgtacactttatagcattccgaatcttcgtcatactttgcgtcaatcgccgctacgatgcattgcgagccgaaaaactcagctccttccgtaatcagctcgggacggagaacggccgctgtattaacggataccttgtcagcgccggcgcgaagcattcgtttcatatcgcttaattgattgattccgccgccgaccgtaaacggaatcgccagttttgccgcaacttgttctacgacgtctgtcatcgtcttgcggccttcgtgagaggcggaaatgtcgagaaaaacaagttcgtcagcgccctccctgtcgtaggcttcggccagctcgacaggatcgcccgcatctttcagcccgagaaattgaatgcccttgacgacgcgtccttctttcacatcgagacacggaatgattcgtttcgtgatcatgcgtccttcacccttctgagcgcttcagccaatgaaaattgttttgtatacagcgcttttccgataatcgctcccgatacgccggcgtctttgaagcgggccagtgctttgaggtcggcgactgagctgactccgcctgaagcgatgacgtcttttcccgttgcttttgcgagctgaacggtactttcgatgttcggtcctgacagcatgccgtcagttgcaatatccgtgaaaatgaaggtttccgctccttcggccgccaattcacggcccagatcggccgccattaccgaggatgtttccagccagccttccgtcgagacatatccgtttcttgcatcaaggccgatcgcgattttgccgccgtattgtttcagcatgctcttcacaaatgccggatcggaaacggccgagctgccgagaatgacgcgatcaacgccttgtgataaataaccgtacacatccgcttcagaacggataccgccgccgatctcgactttgacatcaagctgccgcgcaatgtcaagaacatgcctgtcgtttactttcctgcctgctttcgcgccgtcaagatccacgagatgaatccattcggcgccttcttgtgcaaattgcgccgccatgtctaaaggagagtcaccgtatatcgtttccttgccgtaatcgccttggatgaggcggacgcatttgccgtttctcatatcgattgccggatataatgtaaaagcgttcatttcttcaccttctgttccgctgccatttttgtaaattgtgttaagatcgccattccggctgtaccgcttttttccggatgaaactgtgcaccgaaaacattgcgtttcccgacgacagccggaacacgaacgccgtactcagcgcttgccagaagatcgccgtcttccatcccgtctatataataggaatggacaaagtaaacgaagccttcttccgcttccgaaagcaaaggagacgtttggtgaaacgtcagccggttccagcccatatgcggcaccttcagcttgtttccttcggcatctctgtctttgagtctcacagcttttccggctaataaaccaagtccttttgcagagccgttttcggcgctctcttcgaaaatgagctgcatgccgaggcagatgccgaggagcagcttaccctcgtcaaccatacggtgtatgaattgatcaagcttcgtgctgcgtaaattgtccatggcgtcactgaatgatccgacacctggaagaataaaagcatccgctttttcaagctcttccggccggtctgatacgacatacgggacgccgacgcgttccagcgctttcgacacgctgaataaattgcccataccgtaatcaattacaccgatcatttacagcattcctttcgtagacggcacacccttgacgcgcggatcaatggatgacgcttcatcaagcgctctgccaagcgccttaaatacggcttctatcatatgatgggtattcgtgccgtaatgaacgatgacgtgcagattcattctcgcttcgagcgccagtttccataggaattcatgtaccagctcggtatcaaacgttccgactttcgcttgcggaaatgcagcgcgcatctcaaggtgcggccggttgctcaggtctacggcgacttgggcgagcgcttcgtccatgggcacaagcgctgatccgtaccgtttgatcccttttttatcaccgagcgcctccaaaaaagcctgccctaaacagatgccgatatcttcagtcgtatggtgatcatctatctccgtatcgccttttgcgtcaaccgttaaattgaattgcccgtgctttgtgaacaaatcaagcatatgagtcataaacggcacatccgtgctgatgtcggcttttccttctccgtctatttcgaaagccagccttatatccgtctcatttgttgttctggcgcgttccgcttttctcatcggtcattcctccgtttctcgcttcaatcgatcttgcgtgcgcttccagcccttccagtctcgcgaaggcggaaatgctgtccgcgtgcgtttcaaatgccttccggctgtaagagatgatgctcgatttcttttgaaaatctgttacattcagcgggcttgaaaaccgcgccgttccgtttgtcggcaaaacgtgattcggtccggcaaaataatcgccgaccggttcagcgctgtatcgtcctaagaaaatcgcccccgcgtgtctgatgcttccaagcaaagcctccggcgaatgcgtcatgatttctaaatgctcgggcgccagctcattcaccgtgtccaccgcatcttccatcgattccgtaatataaatgcggccgtgatccctgatcgacgcttcggctatttctttgcgcggcagggtctgaagctgtttattcacctcatctgataccgcttcggcaagcttctgtgaatcggtgacaagcacgcttgaactgagcatatcgtgttcggcctgtgaaagcaggtcagcggcgacttctttgggcaccgccgtatcgtctgccaggaccacgatttcacttggcccggcaatcatgtcgatatccacaacgccgaagacttcgcgcttcgcgagtgctacaaatatatttccggggcccgtgatcttatcaacaggctgtatcgtttccgttccgtaagcgagcgcggcaatcgcctgtgcgcctcccgctttgtaaatttcctttatgccgagctcagacgccgccgccagaacgcccggtgaaaggcggccgtcttttcccggaggactgacgagaacgatccgttccactcccgcagcgagcgcggggatgacattcattaaaacggaagacggataagcggccgtcccgcccggcacgtatacgcccgcggaatcgagcgccgttattttctgtccgagcatcgagccgtctttgcgatggtaaaaccaagaggattgcagctggcgctcgtgatattctttaatattggcaatcgcctgtctgatcacttccagcagctgatcatcaagcagacggtatgcctcggtgatttcctctgcgctcacggccatttggttcaggctgatgccgtcaaatgtttttgtataggccaaaacggctttgtcaccgttttgtctgacgtcttcaataatccccctgacggttttccgctgctcttcggttccgctgtcgatggaacgcttcagtgaaaaccgctcgcttctttttactgcggttatgttcattttgccgtttctccttccacaacccgtgccagcctggccgccatttcgtcgattacatcatccttcatgcggtagctgaccggattgacgataaaacgcgatgtgatgtcacaaatatgttctgattcaacgagaccgttttcctttaatgtccgcccggttgatacgatatctacgattctgtcagcaagcccgattaaaggcgccagctcaatggagccgttcagcttaatgatttccacctgctcgccctgctctctgaaataactcgacgcaacattcggatatttcgtcgcaatcctcggtgcgactccgttccaatccgccccgggaagccccgcaacggcgagatggcatttgctgattttcagatcgagcacctcatacacgtcacgctcttcctcaagcatgacatcctttccggcaataccggcatcagcgacgccatgctcgacataagtcgtaacatccatcggctttgccagaataaagcggagattttcttctggaacgtcaatgatcagttttctcgattcttcaaactcctcgggcagcctgtatccggcctgcctcagcaacccggccgcttcttcgaatatccgtccttttggcattgccattgtgagtaccttacccattcctctcttcctttctggcaccgataaagtatgtgacgtttgcgaatgattttgtcatatgatcgatattttcaatgcccgccagatcctgcaggacgacttttctgcctctcgccctttcttcctccgcgaataaaatagcctgggcccgctgctccttgctgaaaatcacggcgtccgcttcacttgtttcttcctgaatgccgagcgcttcaatcagcctgtcgatacggagcccgaagcccgtggcgggagcgggactgccgaaatggccgaggagattgttatagcgtccgccgcttccgatgacgaaaccgacatttgccgcgtacacttcgaataaaattcccgtgtaataactcatatggcttaccatattcagatcaaggcgaatatgctcggcacatccgtaatcctcaagaatgtcccacaggtcttccagctcctgaattaagctttgtccggagattccgatgatctcctccgctttggcgcaaatctctttcccgcctcgcaattccaaaagtgcgagcagccggcttttgtctattgaagaaagcggaagcgatttgacatgttccctgtatcccacgtaattcttttcaaagagaaagcgccgcagaacatccgcccgctcggcattgcccaaaacctcgacaaacagctcatcagcgagtccggcatggccgatcgcgattttaaaccggtgcaatcccgcgtttttcaaagcgccggccgccagcgcaatcacctcggcgtccgcgcttgttgatccgtcgccgatcagctccgcgccgacctgttcgaattcggccggacgtccgccttcccgctcctgagcgcgatagacgcttgccgcgtaccccgctctgagcggatgattgtgtttgtgcagcttagatgccgccaccctggcaatcggtccggtcatgtcgggccgaagcacaagcgtttttccgtcctgatcgagaagcttaaacagctgctgttcttcaatggctgactggacgcctactgtttcatagaattcaagggtcggcgtctccataaactgataaccccatttatcaattaaatccgtcagtgtggaacggacttttttcttggcttcgtataaaccgggcagcgtatctctcatgccatgcggtttctcaaacataaacatttgccttttacacctccgctttgtctgaaggaaaattccgaatcctttagttcgctaatatgataatatgttagcagataaaagaatggattgcaacgcccaatgtccgcctattcttttccataaacatggctaaagaatgaacaaacctgtaaacatatcggaacgatcgaatcatattgagcagaagtgctataatacatagaacagcttcatcagaaacaagggagaataattgataatgaagacgcttggaacattatgtgtgctgattctgacagccatccttgtctatctgggatataacatctatacaaacgatattcatttaaattttttcaatcagcagtccgacgagcctgatgagaaaacaccgttaaaagggagcgcgtcaccgctgaatgtcgttctgtacagacagatggattctcccagactgtacaatggctgtgaggtgaccagccttgccatgattttgaacaatgccggatatcatgtgtcaaaaaatacattggcggataaaatcaataaagttccgctcacatacagcagcgggctgaagggagatccgaatgaaggatttgccggagatatggaaaacggcccgggtttaggcgtttatcatgagccgattgataaacttgccaaagaatatgcgggaaacaaagtatacgatcttacgggaaaagacatttcttcagtgtaccgccagcttgaaaaagggcggccggtctgggtgattaccaccacatcctttaagccggttgatcatatgcagacttgggatacaccgaacggaaagatcgacattacgttcagcatgcatagcgtagccgtaaccggttatgatcacgattatgtatacgttaatgatccttacggctataaaaacagaaaaacagaccggtctgactttgaaaaagcctggaagcagatgggcagccaggccattgtgatcaagtcataaaaaaccccgctgacgttaatctgcggggttttccattcgttttttcatttcttcgtgcgtataaatcacctgcatcggatttcctccgacaaacgccccggcggggacatctttgtgcaccagcgtgccggctgatacaacggctccgctcccgatggtgacgccgggcagaatggttgtgtttgccccgatcatcacctcgtcaccgattgtgacaaaaccggtccggtactcacgtattaaatattcatgagccaaaatcgtcgtattgtagccgataatgctgttttttccgacagtgattttttcgggaaacatgatatccggcatcaccatcagcgcgaatgacgtctgttttccgacattcattttcaaaaaggttcggtacagccagtttttcacgcttaaaaacggcgtataccttgcaatctgaatgatgatgaaatttttcatcaccttcaggaagggaaccgtctgataaacatgccacaatgaatttgcacctgcaaccggatggcggtctgtttttctcacggattacttcactccggtgatgtgcaataaatcactcattttctcgagcatataatcgggttcataggcggaaagcgtctgtgcgcctttaatcgtccacgcgacgccggctgttttcgtgccggcgttttttcccgccatgacgtcgtgataattgtcaccgaccatgatggcttccgacggatcgcacccaagccggctgagcgcaagccgcacaggctcggggtcaggcttcgggtgctttacatcatcaagcgtgacgacagtatcgaaaaacgccccgatgcctgtcagcttcaatcccatattgactgtatccctcagcttagtagtgacaataccaagctgatagcccgcttttttcaattcatccagcgtttcataaaccgtttcgtactccgtgacgagctcatcgtgctttttatggttgaatgctctgtacatgctgatcatgtcatcgcacttttcggcattaatgcctgaaaacgtttcgtacagaggcgggccgataaacggaagtacatcttcccttttaaactgccccgggcaataatgatcaagcgtatgaaggtaagaagcgataatcagttcattcgtgtcaatcagcgtgccgtcgagatcgaataaaatggcggttacatgtttatcagtcatcttatgtcctttccgatttcagtcgtcagtccgtgtcagcataccgcttatcggcataccccttcatgcgtctgaaaatcattaaaataatcgcaagtataatcagcacaatggaaatgacctgcgcgatccgaagctggctcgtaagcatcaggctgtccgtccgcattccctcaataaagtatctgccgattgaataccagatcacatacgtcaaaaacagattgcccctgcgcaggttcacgcggcggagcagaagcagaatcacgacgcccgcaaaactccacagcgattcatacaaaaacgtcgggtgataatattgtccgtctatgtacatctgattaatgatgaaatccggaagatgcagactttccaaaaatgaccggctgaccgctccaccgtgagcctcctggttgataaagttcccccagcgtccgatggcctggccgagcagaatactcggcgcggcaatatccgccagcttccagaatgagatgcctcttacttttgaaaagacaattcccgttgcgatcgcgccgattaatccgccgtgaatcgcaatgccgcctttccaagttttaatgatttccccggggtgttccgagtaatagctccactcgaaaagcacataatatgcccttgcgcaaatgattgcgatcgggatggcgaaaagaacaagatcaataaaaatgtcctttttcagcccccgcttttcactctccctcatggccatccaaagccctaataacgcgcccgcgccgataatgatgccgtaccagtgcacggataaaggcccgagctgcaaggcaatcggattgatcggtgttccagcttcattcatattattgccaactcctattcgtcttgttcgccgtcctcaatgacatccgccagcttattcgtgaattgttcggcagcatttaagcccatccgcttcaatctgaagttcatcgccgcaacttcgataataacggcgagattccgccccgggcggacgggaatggtcagttttgtaatttccgtatcaatgattttcattttttcttcttcaagtccgagacggtcgtattgctttccttgctcccaaagctcaaggtccatgacgattgtaattcttttattgcttctgacggcgcccgccccgaacagcgtcatgacatttataatgccgagccccctgatttcgagcagatgctcaatcagatcaggcgcgttcccgacaagggtatcctgatcctcctgccggatttcaacgcagtcatccgcgacaagacgatggcctcgtttgacaagctccagcgccgtttcacttttaccgacgccgctttttcccgtaatgagcacgccgacgccgtatatatccacaagcacgccgtgaatggccgttgtcggcgcgagacggctttcaagaaaattcgtcagcctgcttgacagcctggttgttttcagaggggatctgagcacaggcacgccgttttgctcggaagcttctacaagctccggcgggatcggcatatctctggaaagtatgatagccggcgtcacatcggtgcacagcgatttcatccgctgtttcttatcttcctcgggaagctgatcgaaaaatgacagctccgtttttcctaaaagctgcacccgttctctcgggtaatatgtaaaataaccggcgatttcaataccgggccgtgataaatcactcatcgtaatcgggcggttaatcccttcttctccgctgatcaattctaaatggaactgttccattacgtctttggtccgaacctttgccaagatatgttcctcctgttctgggatgttccgagctttgaacagttatattttatcactttaccgtctgaaccaaaacagatttatacaattccggcataactggtctagataactagtctgaaaaggagtaaaataaaactaacaactaaccagaaaggcgtgttttaaagtggctgaaagcttgttaatcagcggtgcggacatcgtaacagaaaaagaaatcatccgaaacggttttctcggtataaaggacggcatcatttcttacgcgggaaaaacaaggccgcaagaaacgtatgagaaggaatggaaggcgcccgagggctcgtatgcgcttcccggaatgattgatatccatattcacggcggatacggcgcggatacgatggatgccgatgttgcggctcttgatacactgtccgcccggctgcccgaagaaggaacaaccgcttttttagcgacaacgatcacacagcagcacgaaaacattgaaaaagcgctcatcaacgccaaaaaatgggcgtattcctcaccggagacccaaaaaggcgctgagttgatcggcattcatttagaaggaccgtttgtctctccgaaaaaggcgggagcacagccgaaacaatggattactcctgctgatgccgggctctttcagaaatgggagcggctctcgggagggctgatcaaaatcgtgacgcttgcgccggaagaagatcctgatttcagcctgatccgttatttaaaaaaccaaaacatcatcccctcaatgggacacacagacgcaggagccgagcttttacaaaaagcggcggatgccggggcggtgcatatgacgcacctctttaacgccatgagctcctttcatcaccgtgagccggggggcatcggtacggctctcgcctgcggccgcatcacggcggagctgatcactgacggcattcattctcatcctctggctgttaagcttgcctatttggcgaaaggaagccaaaacctgatcatgattacagactccatgcgggcaaaagggcttaaggacggagaatacgaattcggcggacaaaaagtcaccgttcgcggggacacggcgcttctctctgacgggacgctggccggttccattttaaaaatgaatgaaggcgcggcgctcatgcgcaggtttacaaactgctcatggccggatatagcaaatatgacatcggcaaatgcggcccgccgcctcggcatattcgaccgtaaaggaagcatcgccgaaggaaaagacgccgacgttgttctgacggacggacagtgcggcgtgctggccacgatttgccgcggaaacaccgcatatatctcaagggaggctgattggacatgaacgttatcacatgcagacattatgaagaattaagtgaaaaagccgcagcgattatcgctgaaacagtgaaacaaaagccggatgccgttctcggccttgcgacgggaggcactcctgaaggcgtatacaaagaacttgtgcggatgcaccgctcagaaggcttgtcgttccggaatgtcacgacgatcaaccttgatgaatacgccgggctttctcccgaggacaaaaacagctatcattattatatgaatacacatttttttgcacatatcgacagccgaaaggaccgccactttctccctgacggacgggcagacgatcttgatgccgaatgcgggcgctatgaccgattgattcaaacactcggcggagcggatatacagcttttaggcatcggacacaacggccatatcggctttaatgaacccgggacgccatttgaatcccgaacccatgttgttgagctgaatgaagagacaagacaggcgaatgcgcggtactttccgtcaattgatcaagtccctgaaaaagccctgacaatggggatcgggacgattttgtccggcaaacggattctgatcatggcatccggaaaaagcaaggcccaagcggtgaagcagcttctggacgggcgcgtcagcgaagcattccccgcctccgccctgcacgcgcatccggatgtgacggtcttgattgatgaaaaggctgcgggcggcgattgaaaggatttgacctatgcagattgataaacaatctccgattccgatttactttcagattatggaacaattaaaaacacaaatcaaaaacggcgagctgaaagcggatgcgctgcttccgtcggagcgggaatacgccgaacaattcggcatcagccgcatgacggtgcgccaggcgctttccaatttggtgaatgaaggatttttatacagacagaaaggccggggaacgttcgtcagcaaactgaagatggaacagccgcttcaagggctgacaagcttcaccgaagatatgagaagccggggcatgaagccggggagtagacttgccgaataccagctgattcaggcgacggaagaattatcttctatcctggggtgcggctatccggcaacgcttcataaaatcatccgcgtccggctggcaaatgatatcccgatggcgattgaggcatcgtatatcccgtttgacaaggcgggaaaattggatgcctcccattttcaatcatccatgtatgagcatattgaagcgtacaatcagatgccgatctcacgggcaaaacaagagcttgaaccgggaaccgcttccgaggaagaagctgagctgctcggtatccagcccggcgcccccgtcctctatatcaagcggaccacttatctgcaggacggcactgcctttgagcacgtcaaatccgcctacagaggcgaccgctacacattcgtgcattatatggacagggtgaaatgaaacatctccaaccgttacgggttggagatgtttttttgatctgccattttcaaatcaagccggtgaatgttctctatgactctgtcaaaacgaagaggctggggttccggtatctatttttataaagaaaagagtaataaaatgctatcctctgttttggacaatatacggaacctgctttgaaatcagcagcagcggttctttgtttttatgagccaatgaaaacatgattgcgccttcaatcatcgagttgattgtcatcccaagcttctccgcttcctcttgttcaaacccatgctcaagaaattttgccgcaaacacatccgtccacttcttgaacacctcaacacatgtgcatcttaacgtttcattgatcagagcggtctcacccgccagcaatccaaccggcacgccctcaatattctgcggatcattaaactgttcagccgttacatgaataaagtgctgaatcgcttctacagggtccgcggattgagacatactattctgtatctgcttttcaacgcatcttcccgtatatttgatcgccgcaatggcgagttcttcttttccgtttggaaagtgatgatacactgaccctctgggtgctccgctctcttttataatttgattcaaaccagtcgcatggtatccctgaatctgaaaaagatatgcagaggtttgaataattctttcttttgtcccggttttactgttcattatgtttcctcctgcatattacgaaaaccaatcgattttagtatagaaaagggacataaaaaagtcaaaaacacttaccgccatgcatgttacagaaaaaaacctgctgaccgtcagattttcttctgaccgatcggcaggtgtatgtttttgctatgggtttgaggcatgcctgaaatcaaactgatccggagccgggtgatacggcgtatttcccgttttgaacatccacagcggtgatattgttttgccgttgtacgggtccttcacgacggtgtaccagtaataaacggaatcaggctgcaggccgtcccagacccaatttgcggtttttccgctttttacgtgttttttatgaccgagcagttcgttcgtataaacgttgcattcaaaataatcagtcgctacccttttcctcttcggctgtaaatccatttctgctgagaattcgtctttatcagcgaacagatcggtgtcatagtaattgatgtcatccgtgtacggcgagtaggagaacatgtgaacctgattggcggcctgatcaaattgcattatgcgcataaagccctgcccccttccggaccgtcctggtagtcggtcagaatttggtggacgaggcggtccggttttccgtctccgtcatcgtcaagcgcatcggtttttttcatggcgttatggtaatggccgcttaataccatcgccacattgcgattcggcttgacgacttttcgatagatcgtctccccgatcgggcttcgatttccgctcacaagcaagtactcatgaaagcataagatggcggttcggtccggatacctcttcagcacttgattgatccagtcaatctcttgttccgtaatgccccagcccatataaatcataataaaatcgttcccgcttgccgacagcagatcataatgcccgcggttatttttgtatgatccgccgtaatgcatgttctgttcaaaccggcggctcccgaagaaatccccgaaggttcggtatgtgccgtctttatggccgacgtcgtgattgccggcaagcactccgtacggaatccccgccttgtcaagcgtccgcatggagtgatcggcgtttttccactgtttcatcaccattgaatcatcgacaatatcaccggtatgaaagacatatttaatattgtgcttttccttattttctttgatccactccgtcattttgtcaaaaatgtgcgggtgcccttgtgcgtaatactgtgtatccgacatccagacaaacgtgtaattgcctttcgccggtatttgatcctgcacgatgacattcatttttgagttcttcaccacatccgctgcggaaacggcggcttttaatgtaaacggctttttatctttggcaaggacgctgtccgcctcctgccagcggcttgtccggtaattccaaatatacatggttacctttcggccgggcagagagcttcctttccagaccgcctcggccagatccgtttcgtcgatagacgggtcaacggagacttcgaaccggtgataaggaaaacgctccacactttccgccgaaacggtttttccgtcatttgccgagatacggttcatttccggcagggtaaacggcatttcattttcttttatgcccttcggcggttccgttaatgaggcgtgtttatacactttcacgctgcccggattccgcgcggtataacggaagccgcgataaaatgatacattcatgtcatccttcgtcgggtcttttacccggacggacagctttgctttgcgggcgccgattttttgaccggcaagctccggctggttcggctcctcccgtttgatatggaaggtgcggacggacgttgtttcatttccggcaaggtctgccgcaatgatagtaagggtgtgctttccgggcttgagatcggctgatgacgtgtgatgcgggagcgtaatgctttctccgtccaaaaacgctttcacctcttccactttgctccatttatcacggatgtccgcattcagctcaacattacctttcagcgccgcgccttctttaatacccgggacaatcttcggccccgaattgtccaccctcacagattggctcagctgctcctcaccgtcactgacaaaaatatggtgatagccttccgaaagcttcgccgtgttccacggcagcagccgtgacgtaaacaaatgatccggcaggctgaatgagaaggtcttctgctgattcgcccgcttgccgtcaccgataaacagctgctcggacgggtccgtcttcccgtctttgatcaccgttccgtccgaaagcaccagacgggcatgtttcacgacaaaatcatcccgattctctcccgtgtcatacggagaaacctttgagcccgaacggatggatactttctgtgttttgcccccttttagcagcagacgttccggaagcagaaccgagtgcgttctgtagcggtgagacggatcgtcaaaaatgtgcagcacctcgttttccatcatgacggtgttttgaaaataaagattcgttttccgggcatcgaaggcgaaatagacctctttttccagcgccggccgggtctcctgccgcttgccgtcaatccacagcttgatcttatcggcgctgacgtcggaagtcgctttgagcagataggtgccggatatcgtatcttccggttcaacattcattctgagtccgtgtgatttgctcgtctgttcaatgtcaatcatcttgacgggcgtttttgcttcattttctccatcactggctgcgatataatactcaagctgatcctggccgagcagttccggggaataaagaatgtgatggtataagctgtcgttgcggtctttttcggccagaattcgtttgaatggttttttctcattggtccggtaataaaacgcggctgttttgacaaggtttttgtcttttatgtcagcctttaattcaatgctttcagcgggccggacgggctttctgtctgtaaggtcttcgatgaccggtttttccttgtcgggtttgatcacccttttctgctgcggaatctgcgcctgaaaaacggagcccggtgacggcttatgctcgctcgtggagatcttcagcaattctcccgttccgttcagcggatatttgtacagcaaagaagtcagccggcggaaagcgtgtttccggtattgcgctgaggcgatatccttgccggtatttgccgacagcacgaccgtacgcgggcggccgttggacattccgtctgtcccttcgatgacggcgagatgttctccttccttcagacgtgtcccgtaatagcggttgaaatcatctatcgtcagttctgatgcggcgcgtctcagccaaaacacgtaagtcccgcctgacggaatgacggtatcctctttcggcctccatatcatatctgattccggcccttccttcggatagcggtagcggatatgatagtctttaaaatgaatgggcctgtccgtcgtgttatacacctcgataaattcataggcatcagcgccatcttcatttttcgtatcaaccgcaagctccgtaatcatcagctcgggaatatgattcaaatcggcttgatagccgtccagcttcagccgctttttctccgattccgcccgctgtctgccgttggtgaaaacgaggtaatattccaattctccattccagatatcccgttttgaaacctgggccgtaaaaagccggattgcgcctggcgcgggctccatcggcaccatcttaaaccccagctcattgctttgtttataaaaaagaaacgccgaaaacgcttgatagtcagcattccgtacatgagcctgtatgaacaggtttcttttcatttccgcctttacttcgatttggggaggattctccagaagcggtatgtaatgaggcggctgtccgaattcctgctgattcacggggattgccgattctttgcgcgccgcatccgcagaaggactcacacaaagcaaaccaatcagaaaaaagagcgtcatcacaagtttcatctcattacctccctatgcattatgttgcgtcaggaggctgccgcttatgtaaaccgcacataaaaaagctgccctctcgggacagcttgttttttatccttttctaagcggctccaatatgcctttttggatcagcaagtggaaaacggacagcacgacggatgcccaaatggcggtgccgaacccgtcaatctgaaagctgtctcccatcaaggctgcggtcatcattaacgtaatggcgttgatgacaaacagaaagaggccgagggtcacaaccgtgacaggcaatgtcaatatgacgatgatcggtttgatcagcacatttaacacagaaagaatcacactggcgatgacagccgctccgatactgctgatatggacggaatcaaaatatcccgcgataacgattaataataaagcatttactaaaatgctgactgcccatttgatcatttatttcaaatctccttctaaaggtacaacaaaacaccagataatatatacaatcggcacgattccgctcgtgacaagcgctaatacaacggtgataatgcgcaaaagcgacgcatccatattgatgtactccgccaaaccgccgacgacgccggcgattttacggtttttttctgaacggtaaagtcttttcatccaatcacctctgagtatgcttgagcttaatggctcctgttaacgattctgagaaaatcgagagatgctgatcatggccttgatttgatgccagcatcagttctttttgaatggtatcattcttttcctttaaaatttccgcatcaatcagctcatggctgagagagccgagattgcttttgagctccgctttcaccgccgaatcatcaggcagggcgatctccacgtttccggtcgtcgttttcgtgtagatggagcggcagtgcggcgctgtcacggtaagcatgatattgccgttaaagctttgaacgtcaatggattcactcgatccgcgcaaatcaatcaagccgttgatcgtttccgcttcaatcgcgccgcattgatgtccggccagcttgatttgtccgttagccgtttccgccgacgctttctcagccgtcaaatgagagaatgacagaacgccgtttgtcgttttcgccgagaattcttttacatgtaaatgttcccctctgatcggtccgttaaacagcttcactcttatcttatcgtactctttctgaggaacataaagcgtaacattggttttcatcgttttcttttccgtgcggacaaaaaacttattgcccttcacttcacactcaatatgctgaagaaatgcggtgcgcgccgcctcctgactgtccgcccggtacactttcgcctggcactccgctctgatatcttcatccgcccacggcacgatattgacgctgccgtttgcaatctgcatatcaatggccgagaattcactgtctttaaattgaaaaatatgctgcacttcgtgtgcgtggccgaaattcagatcaagatccgcttccttcacttttttgacggcagaatcaatccagtcgaacagcttcgccccgagcgacggcttttggcttccttttgcaccgctttcgaaatcttccgcaggttcctgaacctccgcagataatgcggtgatctgatcttctttttctttatattcatgatccagtttttcaatgagcgtcagtgcttcctgcgccgtcagcatgccgtcttccacaagctttaaaatccgttctttctcctgtttcatacaaaactcctcccccgacttttcttacacctggcgtaacaccttaattccctgcacgatattccaaatgaccattccgatgaggatcagaaaataaacagctgctcctgttatcataacaaaaacgggcaccatactctccccctgggccgtaatcaatccgccgacaacaccggcggtcacaatcagcaagcccgcaaacggaatgatatgggaaatcagagcgcgcatggcatgccgcttcgtctctttttcatcgacgacaaagtaagccacaatcggaagaatgagcggcgcgagaaacacgctgaaataacagattgatgcgataatcgcttgatttcggttcaataaaaacactccctgtgccatgatataaaaaaccattccttatacatacgtatgacgaatgagcgggtttcattttcatgctaaggacatgcttcgttatacgtaatttttggtttcagagatttcactatagaatcttttccccgaaccgattacaatatgtaacaaagcctgaccgtatgcaaggaggacatacaaatggagaaagatcccgaaaacgcccaagtaacggaagagagtcttcgaaatttaattcgcgaacagaaaagaatgaacagcgaaatgctggctgaattagaacagatcaaagcagcccctcttcccatttcccatgatatccaatatataaaagtgctgctggacagcagcagcacccatattctgcaggacttaatgcatttaagcagacagcttccccaacagaaaaaaagcctgtaacaacaacagcccaaaaccgatgagttttgggctgtttttattgatctattacgtggctgccgtttctttttcggccagcaatgttttcatccgttttttatcgcgttccattaccggtttcagatagcggcccgtatatgattctttcacttcgacaacttcttcaggcgttccggaggctacgatcgtgccgccgcccgctccgccttcaggtcccagatcgacgatgtagtccgccgttttaatgatatcgagattgtgttcaatgaccaaaacggtatcaccgttatcgacgagtctttgaagcacaaccaaaagccttgcgatatcatcaacgtggagccctgttgtcggttcgtccagaatatacagcgtccggccggtggaacgcttatgcagctcggaagctagcttgacgcgctgcgcttctccgcctgacagcgtcgtcgccggctggccgagcgtcacatacccaagtccgacatcagcaagcgtttgaagcttgcgtttaattttcgggatattttcaaagaaagacagagcatcttccaccgtcatatccagaacgtcggaaatgctttttcctttgtatgtgacctcaagcgtctcccggttgtaacgtttgccgtggcacacttcacacggaacgtacacgtcaggaaggaagtgcatctcaattttgatgatgccgtcgccgcggcaggcctcacagcgcccgccttttacattaaaactgaaccggccttttttatagccgcgcacctttgcttcatttgtctgcgcgaatacatcgcggatatcatcaaacacacccgtgtaagttgccggatttgatctcggtgtccggccgatcggcgcctggtcgatgtcgatcaccttatcaagatggtcaaggcctttgatttctttatggcttcccggtttcgctttggctttatgaagcttttgcgcaagcgccttatgcagaatttcattcacaagcgtgctttttcccgaaccggacacacctgtcaccgccgtaaaagtgccgagcgggaatttggcgttcgcttttttcaggttgttttctgaagcgcctttgatttcaatgaaccggccgtcaggctttcttctctccggaggcatcgggatgaattgagcccctgacaaataacgtccggtcagagaatccgcatcattcatcacttcttcaggcgtccccgccgatatgacgcggccgccgtgaatgccggcgcccgggccgatatctatcaagtaatcggcagccatcatcgtatcttcatcatgctccacgacaatcagtgtattgccgagatccctcatgtttttcagcgcgctgatcagacggtcattgtcacgctggtgaaggccgatggacggctcatcaagaatgtacaggacgcctgacaaacgggagccgatctgcgtcgcaagcctgatacgctgggcttctccgcctgacagcgttcccgccgccctgctcagcgtcaggtaatcaagaccgactttatctaaaaagctgagacgctccacaatctctcttaaaattaaatcggcaatctgcatatctttctcagacagcgtcaggtttttgaaaaattccagcgcatcgccgacggaaagctcggtaatggtgccgatgtggcgcccgttgaccaaaacggcaagcgcttctttcttcagccggtagcctttgcacgtcgggcacggcttctgtgacatgtactgctccatctgttcacggatataatcggagcttgtctctttataccgtctctcaatattgcgcagcacaccttcaaattcaatttcattttcgcgcacttgtccgaaatcattctcgtatttaaagtagatccgttcattgccgctgccgtacagcactttatcaagctgatgcttcggcaggtctttgaccggagtctccatatcaatgccgtaatggcggcagaccgcctgaagcagctgcggataatattgtgaactgatcggcgtccacggcgcgatggcgtgttcctttaatgacagttcaggattgggaatgacgagctcagggtccacttccagcttcaaaccgagaccgtcacaagtcgggcaggcgccgaacgggctgttaaacgaaaacagccggggttcaagctccccgatagaaaaaccgcacagcggacaggcgtgatgctcgctgaacatcagctcttcctgaccgatgacatctatcatgacacggccttcccctaagcggagcgcggtttccagtgagtcggaaagccgggcggcaaccccttccttgacgacaatccggtcaatgaccacttcaatggaatgctttttgtttttttcaagttcaatatcgtcggaaagctcggccatttctccgtcaatccgcacccttacgtaaccttgctttctgatttggtcaagcactttgacatgggcgccttttctgcctgagatgatcggcgcaagcacttgaagcttcgtccgctccggatattcaagaatccggtcaaccatctgttcgatcgtttgcgacgtaatttcaatgccgtgctccgggcagtgcggcttcccgactctcgcgtataagagccggagataatcataaatctccgttaccgttccgacggttgaccgcggattgcggcttgtcgttttctgatcaatgctgatcgccggagaaagcccttcgatcgcatcaacgtccggcttatccatctgccctaaaaattggcgcgcataggcagaaagcgattcaacataccgcctctgtccttccgcgtaaatggtgtcaaaggcaagggatgattttcccgatccggacagccccgtcacgacgacgagctgatcccggggaatcgttacatcaatgttttttaaattgtgcgcccttgcgcctttcacctcgatccggtcaattgccatgtgttcatcatccttccgctttaagctctaacagtaaatcacgaagctctgccgcccgctcgaaatcaagcgctctggccgcttctttcatttcgtgctccatttgctcaacgactttctggcgttctttcttcgtcatcttcgccagtttaggcgcggcttttgttttatattcttctttatcctcagcggcctgcgtcgcgcggatcacatcgcggatttccttattgatcgtttgcggcgtaatgccgtgaatttcgttaaagcgctcctgctgttcccggcggcgcttcgtttcattaatcgcgatttccatcgaattcgtgattttatcggcatacatgatgacgcggccttccgcgtttctggccgcccgtccgatcgtctgaatcagcgaacgttcagaacggaggaagccttctttatccgcatcgagaatggcgacaagtgacacttccggaatatcaagcccttccctcagcaggttgatgccgattaacacatcatgttttccgaggcggagatcacggatgatttcaatccgttcaagcgtcttaatctcggaatgcagataattgaccttgatgccgatttctttgagataatcggtcagatcctctgacatttttttcgttaaagtcgtcacgagaacgcgttcattccgttcaatcctcgcctgaatctcgccgatcagatcatcaatctgtccttcgatcggacggacgtcaatgaggggatcgaggagtcccgtcggtctgatgatctgctcgatcatttccggcgtatgctcaatttcatacggtcccggagtcgccgacacgtacacgatattgtgcatatgcttttcaaattcctcgaatcggagcggacggttgtcaagcgctgacggcaggcggaacccgtgatcgacaagcacctgttttctcgcctggtcaccgttgaacatgccgcgcacctgcggaatcgtcacatgtgattcatcaacgacaatcataaaatcgtccggaaaataatcaagcagcgtatacggcgtagaaccaggaggacggagcgtcaaatgtcttgaatagttctcgatccctgagcaaaaacccatttcccgcatcatttcaagatcatacctcgtccgctgctcaagccgctgcgcttcaaggagcttgccgttttcgcgcatcactttcaagcgctcctcaagctcctgttcaatattcagaatcgctttttccatcttttccgcccgggtgacgaagtgggaagccgggaaaatcgcgacatggtcacggtcgccgagaatttctccggtcaaagcgtcgacctctctgatccgctcaatttcgtctccgaaaaattccactctgatacaatgttcgtcacgggaagccgggaagatttccacaacgtctccgcgcacgcggaacgtcccgcgctgaaagtcgatatcattgcgggcatactggatatccacaagctttctcagaagctcgttccgctcaatctccatttccggtctgagcgacacgaccatttcccggtattcttcaggcgaaccgaggccgtatatgcatgacacactcgcgataataatgacatctctccgttcaaacagagaggatgtcgcggaatgtctcagtttatcaatttcatcattaatgcttgcgtctttctctataaaagtatccgtttgaggcacgtacgcctccggctgatagtaatcgtaatagctgacaaaatactcgacagcgttgttcgggaaaaactccttaaactcgctgtacagctgtccggcaagggttttgttatgggcaatgaccagtgtcggtttgttcacttctttaatcagattggacacggtaaaggttttgcccgtccctgtcgcacccaggagagtctggtgttttctgccttcctgtatgcctttgacaagcttctcaatcgcttgcggctgatctccctggggctgatatttcgagactaactcaaaacgatctttcacaaaaaagcctccgtttctttacgaaatcttcctattgatatagtaacacaatgacgggcaaaatcactaaaaatacgaactaaagttcgatggtttatttttaccaagtcaatttttgtataaaaaacctgcttttatggcgtaaaagcaggcattctatttcatattcaccatgtcaggcattgtctttctttttgtctgcttcttttttggccatgtacagccctccggccaccagcgatacgacatccaatccaacgataaaatacgtttcggtgtaaccctttaaataggatgcgaaaagcagtgcggctgtgagagcgatcgccacatagtggttaaacgtgacgcgcgtaaaaaggacgaccagcataaaagggaaacataatgcaaaaacggcttttgtaatcacaaaaaccctcctcgggaattcttcatctcatctgattatagtaaaaaatgaagaatcggacaatcgttcccctgctatcacaataccctttttcggcagtcttcaatcatctgtcaaagaaaatgtgaatataaatccattgaaccattaaccagatgaatcgaattacctttcttcagccgaaaggatgagaaggtttaggtctttgtatctttgacagtttcttcctccctctttacaatgtaatgatagtgtttactatcattttcttggatgaagaaaaaaagggggtcataccgcatgtattcagtgcgatttcaaaaagcggaagaatcgagccgctctgcaggagcaaaaggaatgaacctgattaaactgacgaaaaacgggctgcccgttcccggcggttttatcattcagacgaatgccctgacacgttttatggaagacaacgggcttcaagcagatcaggaacagctggagcgcgccattatgaacggcacgttttcaaaagagcttcgggaggagctgaccgcatcgttttatgaattgagagaatcatacgcctctgtcgccgtacgttcctcctccgcgtccgaagatcttgaaggcgcttctttcgcgggacagtacgaaacctatttaaatatcaaaactgaagaagagtttctcggaaaagtgaaagagtgctgggcttccttcttctcggcgcgggtcagcggttataaagagaaaatgaacaatgacaccgcagaaccgttaatgggcgttgtcgtgcaaggtttgatcaattccgaggtttcaggagtcattttcagccgcaaccccgtcacacatgatgacggagaactgatgatcagcgcgagctacggcctcggagaagcaatcgtctccggcagcgtgacgcccgacacatttatcgtcaataaagacacatttcagattgaaaaagaaatcggcttaaaagaaatgtatatcgtctctaaagacgaaggcgtgacggaaaaagagacgtccgctgacatgagaaaccgcttctgccttgatgacgagagcgtcaaagagcttgccatgctgacgataaagacggaggaactgtacggttatcccgtggatctcgaattcggatttgccgaaaataagctctatctgcttcaggccagaccgattacaacgatcgcgcaggatcagaaagcggcagacgaagaacgggaatttatcatgacgccccgggatcagaaagatttttggctcaatatggagtccaatatagaaggtcccgtcagcccgttattcgcttcactcattgtgccggctttggaatacggtctcaaagagagcacgaaggccttccctgtgatgggcatcgagattgagcgtgtcaaacttcatcagggccatgttttttccagacagcataagacggacgacaagctgcccgcagaacagttagaagcgcttttccccgtcttggctgaccgcatgtacaatattattcaggaaacctttctgcctttttatcaaaagctggacgaactggcgcatacagaccatacgccggagactgccattgatgcgttccgaaacctgcaagacttctatttaaaaggatacgcagaacatttcaatattgtctttccgcaggttgcgttaaacatgatactggaatctatgtacggacaggttgagaaagaaaacacctcccttctgtatgaaatgctggccggcgtcatgaataagtcattggagaccgacagacagctctggctgctttccggacaagtaaaagacagccctgagctgcggcgcgtctttacggtttctcatgccgatgagctgcatcagacgcttctgcaatcaaatgagggaaaacgctttcttgaacaagtcggcgaatttttacaggaatacggctggagatccgtgaaaagtcatgatctcattgaagaaacttgggcggaaaacccttatttcgctttggccaacattcagaactatgtccgaaacggatacgattttgacagtgagtttcataaaacgatagaaaaacgaaaacagctctacgccgactttatggatagaattgaagatgacggcttccgggagacgtttgaccgctattatcagtggacattgtcttcatccgtcatcaaagatgatcaccatttttatattgatgcgatgctggacgccaaagcgcgcctttgccttctgaaaatcggcgagctgcttcaaaaacaaggcgtaattgatgatcgggaggatatgtggtacttatacagcgatgaagtcgagaaagcgctggcgtcgccggttccgatgcaggaaaaagccgctgaacgaaaacggctcttcaagcaatatcaattgcttgaagcccccgcttatctcgggactccgacttcggaacagctgaaaacggctgaacagattaccggctccatcacagaagatgaaaaaaacactgaacatcaaatttacggacttgcagcgtcaagcggaatcgcaagcggaccggtgaaagtcattcgtgacgcaagtgaattttcccgtttttcaacaggagacgtgcttgtctgcaaaatgacgacaccgctttggaccagtctgttccaggatgcaaaggccgtcattacggacacgggcggcatcctgtcacatgcggcgatcatcgcgagagaatacgggctcccggccgttctcggcacacgtgccgcgactgacaggctcaacgacggagatatcgtcacggtagacgggacaaacggcaagattacaattgtcaaacgcgcttcatgctaggtttccctctttattgacgggcagggcgggtgtatacttgtcctgccagtatttacgcgaggtgaaacatgttgagaacgacgaacaagagaattattgacgccgcgatgaatctgatcatccaaaaaggataccgcgcagcgacaacaaaggaaatcgcagaaaaagcaaaagtaagcgaagcaacgattttccgtaattttaaaaacaaacaaggattaatgaaagccatgattgaacagcaggcgccggttccggaaagcatgatcaccaaggcggaaggcgatctgtatgaggatcttcttcatttcgccacgacccttctgcagcaattggaacaaaaaaaagaagtgttccgcatctgcctgcgcgaaccggaactattcgaagacgtcctgcaggatattgtcgtatatccgcaatccgtgaaaaagcatttaatcgtttactttaaggagctgacaaagaaaaatatgataagccccggcagcgaagaagctaatgcagacgtctttatgacgatgattttcggttattttatacaccggctgcagctggggaaaagagtcattactctctctgaggaaacgatgctgaaacacagcactgagattttcatgaaaggcattaccggccggtcattttccggctccaaggaggatgaaggatgggttcaaagaaagaatgggcgctgatcgtttcgcttttgctgggagccatactcgttcccatcaattctacgatgatcgcagtcgccctttcatccatttcccgctcattcagcgaatcaattgccagcatcacatgggtagtgaccgtgtatttaatcgtgatggccgtgacacagcccattgccggcaaactcggtgatatgtacggaaacaaaaaaatgtatttatggggcgtcggcctttttctcatcgcatcattggggtgcgccctctcgccaagtcttttcttattgattttcttccgggcgcttcaggctgccggcggcgctttgcttacgccaaacagcatcgccatcatccgccatgtcgtgtctgaaaaacggcttccgaaagtattcggctttttcggcctcggcgccgggctgggcgcagctctcggtccgtttatcggctctctattaattgagagcttcagctggcattcgatcttttgggtcaacattccgtttcttgcgatcgcactcgtgacggcattaatgatgtttcctaaatataaagaagaaacgtctgacgctccgcttgatatcatcgggtccgttttgcttgccggaagcattgtatctattattcttctgacgaaaaatgaaagctctttgggctattgggtgtacgcgctgctcattctcgtattggttccgctatttttcaggcgggaactgcgcacgaaacatccgattattgattttgacctgtttaaaaacacgacctttacgagcgccaatctgtcggttctgttaagcaatttaatgatgtacgccgtgttattgattatgccgctctttatgaccggccacttcagcatgaacacgtcgcacagcggcatggcgctgtcagtcttttctgttttcatgtccgccagcaactggggcggagctcagctgcatcagaaatggggcgcgcgaagaatgatttttctgtccttcgggctgatggccgcagccaatctcttatttctgcttttggtttattcccattccgttccgtttcttatggcatcgcttattgtaggaggcatcgcgtcaggtgcggggctgacgagcatgcaggtatcttctcttgcgacggtagaaccgggcatgtccggcatcgcatccgggattttctccaccttccgttatttcggaagcattatttcttcagcactgatcggtttaatctccgggtttcatattctgtttatcatattgatcggagtttctgtgatcggcttgttcgtatcgcttggaattaagtccggggaaaccgttcagacgaaaaaaagccattcggcataacgaaaaaggttccgtaagcatcagctttccggaaccttttctagttttccttcttcattttctctctcaaagtgtcaccgcaatgccgtttgctctataagaatcttttgatttacaagagaaaaggggaatgtaaatggctgagagttccgatcaagttcggcgctgacatcgtaatccggccgtaaaaagcccggccgccgtcttttattttatttatttcactcactcctatgttcaacttgagcccactatcattactatataaacctataagtattcaagatacatttaattgtacttctctatctcgctgctctgccagcaacaaattcaccatatcactatagctattcaaaccgtctgtctgattatttgccttcagatatacatcatttacatttcttgaaatacttgaaataacaccctcatacttatcccggtactgctcattttgttctatatcatgctgcaccgccttggacagactggacattatatcagacgcctgatctggatccactttctttagctcagatatagaataaacaaatgctagaaaaaaaccactgtaaagtatcattggatcatcctgctgcttacatgccagatatgctataaaatttgcctcatcctcatgcatgaaaccactctgatgtgccaattcatgtgccatagtagcaggcaccaagaaaacgggcacattaacattgatattggattcataagtaaaagggacaaagatgccatttatccctgcatgcgacattagctttgacatcacaactggttttggtgttgagtataaagaatgctccaaaataggatattcctttgataacatttgcatcgagaacactgcgtgttgtgcataataatcaaaaacctctggtacttgagccaaaagatcagtgtccgctaacttttcccttgccaattccatttcaacggcaagcgacttactcaatttgaccagttcctccttgctgtagttctcttctttatattcggtataagacaaaaaagaatatctgtaatagtttattccacccaaaatagtataacaaaaatatatcacgctacagatcgtaactattcctagagcaccacgataaactaccatcctacgtacacctttactcatgataaccttgcgcacataataaacgatataaaatagaaaaagtaacacaaccaacacgacgagccattcactaacagaaaacttgacccaagaaggtacaaatcctactatttttgacaataacggatatacagacctactgtatttttccgcccaatcctgatggttctgcgcgtattttgtcagtatgtaagctataactccaagtgaaatcaacggtaatctcttaagtaaaagcttttttataatgtactccccctatccaacataaccattataatcagttattcttaatatatatcctgctaaagattcatcttctaaaggttttggagttagcaataacctttccaataagccatacctctccttcatttatttttttattatttcaaaataaaacagctaagaaaatataattttcttagctgttttactttctaactgattttgaaatctagtttaggagttcttgaaactattccgaataattatgaaaaatcacattataatgctgtcatttcttcgtgctcgtgttcatcctgcacgaataaaatacctaattcatgatgttcgccttcataggacgcgcgctgatcaaaacggatctcaccgttcaggccgatgatctccatttttacaaatgcgcggtttttttgaagtgcttcataaaaatccgatacatgtttcacggggatgccgtttactttcgtaataatctcaccgatcttcagctcaagatcgtccgcgggtgtattcggaatgatgccgagcaccattaagccctgatcccgcttagagaaataaaacggagccgcgttatcgttcagccgctgtctcaatgataaaaacaggcgtccgagcaccgcaatacaagcggcagctccggcaagcggagtccaccaaagggcagctgccccgaatgcggtcacgataaccccgagaatcatgacacgtttcgccgttatccttatgctgacttccggaagtgacccctgcacacgctgtccgaagccggcgatataaggaatccagatcaaatggaaagagccgcccggtacggtaaagacaggccaccaagaaaggtgtgactcaagcccgctgcccggcaccaataagaaaagcggaagcagccatgcgcgattcgccaattgtcggccgatgggcaggcctctgctgctgacgacaagcgccggagatgttttcagatgcgctgaacggcaggcagccgctccctccgtgataatcaaaaggcccataaacacggccgccgatgcccaattcacgccgaatgcctgcggaaaccgatccgcaaacggcactgtgtgggtatactgaaggataaacgcaatgaacatgccggcgctgacaatataagctgaggacagccaattcatacggaacgtcagcgaaagcaaagcagtcacagccgcgattatgccgagaagaccgaatggaatcgaaattccaagtccaaaaaataatatggagagaagaatacccggtataagtccttttatgtatgtaaagataagctcgtcatacatatccgcgatctttgtatgaaacgtatggcgttcacgtttgatccgcaaatatccgcatgcgagacttatgatgataaaaaaccagaacatcgggtgcaaaaaaaacagaccgatacttttcagaagttcaattccccattgaacagacactgctttcaccgcctcaagccaaacattttaattctattctaccaaataatcattggcttgaatatctcaaacgtctatctctcttccgtcatccacaacgttacatttgagagagagaaatctttcagatagtggtcaacctccacctcgatcacgccgctgatcagaagcatggaccgcttaatatccgtcagattgattcctaaacgtttatggtttttcattaagtaagtgaaataatgcttcgcacactcttcattgatttcgtgaacgcattcaacatttgtgtaattgaccaggtatctgctgaacagcataagaagacttagtgcttttgttgatgaaaatgtgacgtcttttgttctgtcttttagttgttccactaattcataatattttttttcacgcacaatacttgccctcttcaattgtgaacccccatttttttatccagataagcacgggtgattacagctgccgtgctgaagcgccgcaaacacttctgctttcgatactgaaatgcagctgccaaactaaaactgttctctattagaaccttcttttattgtaagaactaaaactgactgaggcaactttcaaaagtttcattttgaatacatattaaatcggcataaagtctctcttctctataaatatcgggtaatgtttgtcctttataaatgtttaaatgtgaaaatttttttaatatcttgtcaaaaccgtcataattatatgtcttttggttcactttttatgaatgacaaaagaaacaggagacgcaaaaaacgcctccttttcatttattttacaaataatgattttaacgccatttgcagctgcaaatcatttttttcgtcagatttcttttcattcatcagctgattcattttttccgctgtctttttatcaatgaccgctgttttatcaagcttgtaccggtcttgaaacgccagaacggcttttttcattgttttgctgaaatagccgtccgctctgcccgggtcgaagcctaggcctttcagcaggatttgggcgtgcttgacatccgcgctgttcatatcaggctgaagcggctgtttcagctgaagcggtcccgccgcaaaataatccggctggctcacagcgattgtcggagcaatgccttttttgtgaatccaattgcccttcggtgtcagccatttgtaaagcgtcaatttaatgttgctcccgtctcccataggcacggcctgctgaaccgttcctttaccgaaagaagtgtcgccgacaacgtcataatgtcccgcttcttttaacgcgcccgcaagaatttctgaagcggaggcgcttcctttatccgtaatgacattgacgggatacggcttcttatgttttaaggttgagaaatattgttttttatcgccgttacgctccgcaatttggatatacggcatgtcttttgtgatgaaatgctttaaaatttgttcgacgctttgaaggtagccgccgggattcccccttacatcaaggacgagaccgtcaatcccttgtttttcaagctttttcagcgccgcggcgaagtcctcggcggtatgctcggaaaatgtcgatatgccgatgtagccgacatgatgaccgcctgattctttgcgggaagcaaatacggtttcaagcgggatttccgctcttttaatccggaatgacagctgtttttcagtacccggacgctgtattttaatagaaaccttcgatcctttttttcctctgattttcagcacggcttcgtttatatctttcccgttcattgacacgccgtttatactgatgatttcatcattcggcttgaggcccgctttttctgccggagattgcttaaacggtgatacgataatgattttattgtctttcataccgacttcagcgccgatcccttcgaaagaagaatcaagagaatcggaaaactgcttagcggtctgcttgtccatataaacggaataagggtcgtttaatgtagacagcatcccctgaatcgctccttcaagaagcttttctttatctacattttccacgtattcgttcgagatcagctcatatgctttttcgattttttccattgcccgggttctttctgcgtctgatgaattcggctgtgccgccccggcaatatgggctccgccgcacatcatgcttagggccgctatcactgcgatcattttctgcttcatcgtttacctcctcttagtcctttaacgaaaacctggagatagtatgtgtaaattgcaaagaattcatgtaacggcaacaaaaaaatgaaaaagcgagattgtttcatatatatgggtaacgtataatattttgtatgcaattcattaaatatacaggagaatgcgatatgaaaataaaattatcgattttatccgcggcggttctggccgcaggcattaccgcctttgtctggccaaaaacagaggccaatgagaaagcgcagacggacgccttgtatgtttctcccgcaggcagcgaccaatatgaaggaacgaaagaaaagccgttccgcacattaaaacatgcggctgaaaaggcagaggccggaacaaccgtattgattcgggaagggacgtacgatgaaacgtttgaagtaaagcacagcggcacggccgaaaagccgattacatttcggaactatcagaatgagcatgtctcaatcagcggcaaatctgcgccaaaaagcgattctgaaactccgttaattcaaatccgcaataaacagtacattaccattcacggcgttacgcttgagaatctctccgtatcatcagaagatgcgacggccatggggatctgcgtcaccggatcaagcagtcatatcaacattgacggcaaccatatccggaacattaaaaccacggctgatgaaggaaatgcacacggcatcgcattttacggcacaggtgccatgaaggatgtcagcattacaaataatacggttgaaaaactgacgctcggcgcaagcgaagcggtcgtgctgaacgggaatgtcgacggatttaagattgccggcaataccatccgggacaataacaatatcgggattgacgtgatcggatacgaaggaacgtccaagcaaaacgactatgcgcgaaacggcgtcattgaaaacaatacggtgagccataactcttcttacggaaatcccgcttacggagatgaatattcagcgggcggtatttacgttgacggcgcagaacatgtggacattaagaaaaacaccgtttacaacaatgaccttgggattgaagccacctctgagcataaagggaaatacgcacgagatatccggattacggataacaaggtgtacggcaatgcatacaccggtatttcaatcggaggctatgacacgaaacgcggcggcaccatcaattcggtgatcgctcacaacatcatgtaccgaaatgacacgaaggaccttgacggcggccagctgctcctgcagtacggcacaaaagggaacacgatcgaaaaaaacatcatgacggcaagcgattcacggatttttatcgcaaatgattttacgaaaaacgaagaaaataccgttaatcataacgtctatcacaaagaagagggaaaagacggcatctggaattggaagaacagagaatatgattcattcacagcgtaccgaaaaggaacggcaaacgattcggattccatttatgcggacccgatgtaccgtgacgaatcgtcttatgactttacattaaagcccggatcaccggccctgcccgtcattcagtaacgaaaccattaaaaaaagccagtctgtatcagactggcttttttatttatacacgaaggaatttccggatggaagtcagacttccccatactccgatcaccgcgccgatcagaatgagcacaagtgatacttgaaacacaaacggactgtacggcagaagtgaaacaaatgatccctgaactttcggggccacccaagcgaccatcgactggtacgtactcagcacgagagcgatcggtatgacagaaccgaatacccccagcagcagcccttccaggaagaacggccagcggataaaccagtttgtcgcgccgacaagcttcatgatttcaatctcttttcttctggcgaaaatcgtgattttaatcgtattcgaaattaagaacatcgccgtgaacagaaggccgatgattaacgcaatcccgatgttgcgtgacaccccgacgatcttaaacagacggctgacttcttctttcccgtatgtcactttatacacatgatcaagcttctcaatttttttcgcaactttcggcgtatcatgcggatctgtcgttttgacgataaacgcgttgttcagcgggttttcctgatcttgcattttcatggcctttccgctgtcgccgaagcttttgaccaattgatcaagctctttatctttagatgaaaactctacgctttggattcctgaaatgtcttttatctcattctgcagcgtatcctgcgttttcttatttgacgtcagatcgattaatactttaatttccacttctttttcagcatttttagccatgttgtttaaattcagcataatgactaaaaacacgccgaccaaaatcaatgtaacggtaacggcactgatggatgcaaatgtcatccacgtgtttcttccgagagatttaaaactctcacgcaaatggcgcccgagaattttaatcataagaaccatactcccctcttgactcatcacgcacaataattccgtcttcgatcgcgatgacccgtttcttcatggtgtttactatttctttattgtgtgtcgccatcacgacggtcgttccgcggttattaatctcttccagcgtcttcatcacttcccatgatgttaccggatcaaggttgcccgtcggttcgtcagctatcacgacgtcaggattgttgacgatggatcttgcgatggaaacacgctgctgttctcctccggaaagctggtcgggaaactgccgcgctttatgcttcagctgcacaagatcgagcacttcgagcacgcgttttttaatgactgactgctgctctccgataacctcaagcgcaaacgctacgttttcaaataccgtcaatttaggaaggagtttgaaatcctggaaaacaacacctattttacgccgcacgaaaggaatctctttttctttcacagccgcgagatctttatgattaatcaatatttgcccttttgtcggtttttcttctctgtaaatcattttaataaaagtagatttaccggctccgctcggtcctacgacatatacaaattccccgggatgaatcatgactgacagcccgttaatcgcttttacaccgttcggataggatttatatacttctttcatctctatcatgaaatcacctaatcttttatttatgtcttgcagccatagagttcgcaaacatacagcggtttatggccgattcgtcaggaaacagatgaaaaatctgaaagttccttttcctcagtacacttcattatacgtcaaatttagacatattactattacagtttcttttcattcccagaccgagaaaaaaccttgcccctataacaggcaaggtttttctgttattttttctgtgacagccattttgcgatcttcacggcttcctcatcatttacaagatggctcggcatattgccgcgtccgtttttaatgatgctttcaattttagcttcatcatacttcccgccgacttcctgtaaattcggacctccgccgccttctaggtctttaccgtgacagccgatacagctttgctgataaagttcttcacccgctgacgcagatgcttttgatccgcctgagctgtcagagctttcttttttcgattcattggatccgccgcatgccgccagcaggacggacatggtcagaaccagcgccagcagcgcccattttgatttcatatgtaagatgcaccccttcgctattataacctcgtttacgcgcgtttgaaaccctcgccgagcacctcgcttgcgtctgcgacaatgacaaaggctgactcatcaatttgtttgacgatttgtttcagttttgtgaattcggtctgaccgacgacacacattaagatcggccggtcatgttccgtatacccgccgactgcggaaatcttcgtcacacccctgtcgatttctttaaacacagctgatctgacggcttcttcatgctgcgtaatgattaaagccattttggagcggttgaacccgacctgcacgacatcaatcgttttgcttgaaataaataccccgagcatcgcatacagtccctgctccactccgaaaacgagcatcgcgctcagcacaattaatccgtccatgatggcaaggcacgttcccagcgacagccccgtgtatttgtgaatgatctgcgccgccagagccgttccccccgtggagcctttgccgagatacacgatgccgattcccgttccgatcccgacgcctccgaaaatcgccgccagcagttcatgggtcgtcgcggcaggcagatctcttgttaaaaagacggcaagcggcagaacgatggaaccgaccagtgtcttcattccgaacttcccgccgagaatgatcactccggcgataaacaaagggatgttaataatccactgcacataagccggttcaaaaccaaacgtttctaaaatggtgctgatcccgcttactccccccgctgctatacggttcggcagcaaaaatacgttaaacacgacccccgtaatcgccgcgccgatcatgatatatatgtaatctttgatcagacggagcggcttattgtgattcacatccatgcaaaatcctccgttctccgattttctctcgatagcattttaagtcttcccggcttagaagtaaataacagccaaataccgtattaatttgctaaagcgctgttgtgaaaaatggaaaaagagaacggataaaaaaacacaccttgccaaaggcaggtgtgttcccggattacgacagtttagaacgtaaataggcgtcaatgaagatatcgatatctccgtccataaccgcctgcacgttccccatttccgtattggtgcggtggtctttcaccatggagtacggatggaagacgtacgagcggatttggctgccccagccgatttctttctgttcgccgcggatttcgtcaagctccgcctgctgttcttcaattctgcgctgatacagcttcgctttgagcattttcatcgcccggtcgcggtttttgatttgggagcgttccgtctggcatgtgacgactacatttgtcggcaggtgggtgatccgaacggctgaatcagtcgtattgacgtgctgtccgccggcaccgctcgcccggtacgtatcaactttaatatcttcggtacgaatatcaatgtcgatttcttcattgaattcaggcatgacttcacatgacacgaatgacgtgtgacggcggcctgatgaatcaaatggagaaatccgcacgaggcggtgtacgcctttttccgcttttaaatagccgtatgcattgtggcctttaataagcagtgtgactgacttaattcctgcttcatctcccgggagataatcaagcgtttcaactttgaagccgcgtctttccgcccagcgggtatacattctgagcagcatggaaccccagtcctgggattccgtaccgccggcgcccgggtgaagttctaaaatcgcgttatttttgtcatatggttcactgagcagcagctgaagctcaaattcattcaattccttcgttaatgacttcagctctttttcaagctcttgctgaaggtcctggtcaggttcttcttttaaaagatcatgtgtcatttgcagctcttcgtgagactcgctcagctgatggtaggagttcacgtattctttcagaccgttcgcttcgttgatgacggtttgggccttctgctggtcattccagaattccggttccgccatcttttcatctaattctgcaatgcgggcttcctttgattcgaggtcaaagagaccccctgaagtccgctaaacgagaagccatattttcgagctctgccctgatttctgataattccattccattcacctcattaaaagatccggggcgccataagacgcagacccggtcatgttcgcttcatacagtcgagactattctgtccggccgcagcaatttttatatttttttccgcttccgcaatggcaaggcgcgttgcgtccgatatccacaaccttgcggaccggcgcttttttcgcttgtttggcctcatcgccgtcctgcggctgatgagccgtcgtttggccctgaacaacttcttcgcgttccagattgctttcaatctcggccttcatgacgaatttcgcaacttcgtcctcaatggactcaatcatgtgctcaaacattgcgaagccttccatttgatattcacgcagcggatttgtctgcgcataagcgcgaaggtgaatcccttgacgcagctgatccatcgcatcaatatgatccatccattttgaatcaacggcacgcaatacgatgactttttcaaattcacgcatctgctctgtaccgaaattctcttctttttcattatattttgtcatgatgcggtccatgatcatctcatgcatttcatccggttcttttccgaagatatcgctcttttcaagcgcgccttcatcaagatacgttgaattcaccagctccacgaggccgtcaagattccattcttccggaagctcctctttcggcgtataagcggcaatcgcacgctccagagaagacttgatcatgccttccacaatgtcgcgcaggttttcagagtcaatgacttcaaaacgctgcttgtaaatgacttcgcgctgctgacggagcacgtcgtcatattgaagaagctgtttacgtgaatcgaagttgtttccttcgacacgtttttgagatgattccacggcgcgtgacaccattttgctctgaatcggcgtggagtcatccataccgaaccggtcaagcatcgccatcgtccgttcagctccgaaacggcgcatcaattcatcttccattgaaagataaaattgtgtgatgcccgggtctccctgacgtcctgaacgtccgcggagctgattgtcaatccggcgggattcgtggcgttccgtaccgacgaccgcaagaccgccaagctcttttacgccttcgccgagtttaatgtcggttccgcgtcccgccatgttggtcgcaatcgtgacagcgcctttttgtcccgcttcttcaataatctgagcttcacgctcatggtttttggcattcagtacctggtgcggaatccctttattcttcagaagtttagaaatcaattcagacgtttcaacggcaaccgtaccgacaagaaccggctgtccggtcatgtagcgctgggcgacatcctccgccaccgccttgaatttcccttccattgagcggtagatcaagtccggacggtcgtcacggatgaccggctggttggtcgggatggatacaacctgcatgttataaatattgcggaattcttcctcttccgtttttgcggtaccggtcataccggccagcttctcgtacatacggaaatagttttggaacgtaatcgtcgccaatgtcatactttcattttgaatctccaggccctctttcgcctcaatcgcctggtgaagaccttcgctgtagcggcgtcctttcatcagacggccggtgaaggaatcaacgatgacgacctggccgtcctcaacaacataatccacgtctttctgcatcgccgcatgggcttttaaagcctggttgatatggtggttcaaggccacgtttttgacgtcaaacaggttgtcgatgccgaacgttttttcagccttcgtcattccttcttccgtcagctgaacgcctttcgttttgacgtcatacgtataatcctgatctttcttgagcgtgcggacaaacgcatttgcctgcacgtacagttttgtggacttctgagcttgtccggaaataatcaatggcgttctcgcttcatcgactaaaattgaatcgacttcatcaataacggcaaaatgaagcgggcgctgcaccatttgttctttatagagcaccatgttgtcacgcaaataatcaaagccgagttcattgttcgttgaatacgtgatatcggctgcgtaagcttcgcgtttttcgtcttttgacattgaattcaggttcaggccgactgtaagcccgagaaacgcaaagatttctcccatttgctgggcatcacggcttgccagatattcgttgaccgttacgacgtgaacgccttttcccgtcaaggcatttaaatacacgggaagcgtagacgtcagcgttttcccttcccctgttttcatttcggaaatgttcccctcatgaagggcgatgccccccatcagctgcactttaaacgggaacatgccggttacgcggcgggaagcttcacgaacgacggcaaacgcttcgacaagaaggtcatccgtcgtttctcctttttcaagccgctctttaaattctgccgttttatttttaagcgcctcgtcagaaagattttcataatctcctcttacggcatcaatgtcatttgctattttttcgtatttgttcagcgcacgtttggtcggatcaaacattttatttaaaatcccaagcatctataacgctcctctatgttcacatgcagattttgcatggaataaatgataattttctgtccatgtatacctctcattatcataacataccttttgctatttccaaagaatttgcagataaagatagagaaaaaccttccgcgcgttcacggaaggctgggtgggtttattcagtcggttcaattaatccgtatttgccgtcatttctgcggtaaacgacatttgtgagattcgtctccgcgttggtgaatacgaagaaattatgtccgagcatattcatttggagaatcgcttcttcattatccatcggttttaaattaaaacgcttttgacggacaatttccgggctgtcatcttcaatttcgtcctgaaccgctacgcccgtatcagcagcgctgccgttctcgaaataatgtttcggaagaccctgctcgcggaattttcggttgacttttgttttatgctttcggatttgacgttccagcttgtttgttgcgagatcaattgcattgtacatatcctcgttatgcacttcagaacgaagcgccagatcagtcatcggaatggtgacttcaactttggattccttatcgttatagaattttaagttgacgttcacatcggcattgacgctctgctcgaaatatcgttccagcttgccgatttttctctccacatgatcctttaacgcaggtgtaacctcaatgttttctcctctgatattgtagttcatcaaagaacgcctccctttatctaaggatatgtaactatttctcttttaccccttctgatccctgctgaaacgttaaaataatgtgtaaattcggtgaacgatgacgaatggtgtcggttttatccggcagcttccggcaggattataagtatatgcaaaggacgcaggcaaaagacctgccgcttgcagcaggtctagtgaagaacatacggtttgatacagtcgtgcgtctgctccatccatagcttataatgcggcagaaagatggtttttaaaaactcctgaaaaggggcggacgggaaatcataatcatttaacatgctgaaatcctgaaagatctcgtcaaatgagcggatcgccgtctccacgcatcggcactcaatgatagacagcagaagcgcatgagaggaatcgagatgaaaaaaagcctgaatcaaatcgttgtaaatccgctcgccctccgtcttaaaaaaatcatcctgcgtgtccaacaggtagcaaagcccctcatcaatcgtaaaaagaagctggtaataggctgacaccaaatggtaatcgttcaaacttctcaaaacactcacctatttgcgtttgtcgtaataacggccgtcacttgtcgtttgctgatacggattgaaatacgtattatggtagattcgttttttcttaagcgtttttatttcatttcggataccatcctgaatccgtttcacttcgccggtaatcagacggtccatcgcggccacctgctgaagcagcgttttttcttcttcggaaaaaggcggctttatgcccgcaagcatctcctcccttttctccgtaaatgccgtaacgctgctgatgagaccgtcgctttccggggcgtccttcagtgcggcgtacatgttcttcgtttcgttatacaaagaaaagacattgctgttcatcaggcaaggccgcccgcgccatggctgtttttccgttcactctgcatggcctgcttccacgtgtcgcgaaattcagtaacgagcttttccgcttcatctaaaaactctccgttattctgcacgttcgcgtcgatcagccggcggcggatgtaatcataaatggatgacatctgctcggaaatctcaatctcccggtttaacgtgatgctgagctcttgaatgatgttttgcgcctttacgatattttcatttttggcttcaaggttgttttgcttcatcgcctgccttgccagcttaatgaatcgcaggcagccgttataaagcataagggtcagctcttccggagcggctgtaaagacggatgtctgctggtaagcagcaaaaggattatttattgccatttttataaaacccccaaggttatgaagttgaagatcctaacattgacgtgagatatgaagattggctgttcaatttctccaatgccgtatccagtgcgctgaactttttataatatctcgtctcgatgtcatccagcttcgttttcatattggaaatatttgtttctatttcatccaggctttttccgatggcaaagctggttgataccgagctttccgtacccgcctgttttgaaatttgaatctgcattttgtttaatgtgtcttttaatctccgggcaatcccctgttcctccgggtttttggttttcgctgtatcagggctgtctgcattaaacagtttagccacgagagcaggattctcggtaattttctgtttcagtttcgcttcgtctttaatgacaagctttccttgatccgtataactatcagacgtctcaattccgaaatcggcaagctgatattttttcccgtcaatcgtaaccgttgagtacagatcaagccgcatctccgccaaaccgttctgcagcgtgctgtcgctccgtaataaaccgcttttggcttttgcctcccactgctcaatctgcttatcggtcattgcttctctttgttcatcggttagcggcttataatcacggtattttgattctgtcaccttctcatttgcgcttttaattaacgtattgtatttatcaacgaaatctttaatgttgttaaaaatgccgtccgtatcagtcgtgctgttaatcgtaaccgttttgttgctgtccgtcacgctgttcagcgtgtatttgatgccgttgatcgtaaagttatttgacgtttttgtcatttcaagcccgttgaacgtaaacttcgcgtttttcccttcggcattggccgtcagtgcatttgttgcatcatcaacggcaaaaccgagctgatctttcagaaagcttttggtcgcgtcatcacctgctgaaagggtaaacccttcccccgttttattggaagtgaacgcaatcgtgtccacataatccgagccgttagagattttctcttttaaagccgtcactccgagacccgagctgttcagtttagaaatgacatcgtcaatcgtatcggttgcggcgatcgtgacgtttacctcagtcggcttcgtttcccccggatttgtgacattgaatttcaatgtttggctttgacccgaagtgaaattgatggcccctgatgatttataagtcgtcggcgtagccagctgctgtacagacatgctcgttgaaatattctgttcggcactgacggccaccgcgctgacactggaatccgaacttgttactgtttttttattccagtttgtggacatcagcatattattaaatgtagtagaatacatgtcggcaatctgggtattcatttcccgataagcatcgcgcttccattcaagcgtctgcttttgctggtttaatttattaagcggctgcttttcggcatccatcatttttttcaccagagaatctacatcaagaccggaattaaggcctgtgattcttgtgaccatatgtaccctctccttttcggcgtttagtcgtagacggctctatgacaacagtgagtttccgactgtttatcatatcacagctccataaatgtatgatcttattcttatatcggtcatattaaaaggttttcaataatttaactgcaaaatataatgtttcattttgtcaatagggttctttggcttgctgaaggaggagttagctgaagaaataaaaaaaagaccctggagaaccaggatctttccgtcattaacctttaagcaattgaagaacttgctgaggctgttggttagcttgcgcaagcatagcttgagaagcctgagtaaggatgttgtttttcgtgtactccatcatctcagaagccatgtctacgtcacggatacgtgattcagcagaagtcaggttctcagaagaagtaccaaggttgttgattgtgtgctctaaacggttttgaaccgcaccaagtttagcgcgctcgctagatactgtgtcgatagctgttttgattgttgtaagagctgaagacgcagctttagctgaagaagagatgtcgataccttttgttactttagaatctgcagctaatttttcagatgcaataactttaccgtcagtatcataatagccggctgcttttgtaaccttaccatctggatctgttacttcatccgcccaagtagcagtgctttttccgtcagttgatgtcaatgtattttgatcattggatactgtataagtcgtaccaactttcaggctttcagagtccattttattgatagacaggctcattgtttggccttcgttagctccgatttggaacgtcaggttttgcgcagttccgtcaagaagtttcttcgtgttgaactcagtgtcagtagagattcttgttacttcagacgctaattggtccatctctttttgaagctcagaacggtcagaatctgtgtttgtatcgttagctgcttgtgtagcaagctcgctcatacgctgaagaatgctgtgagtttcgttcaatgcaccctcagatgtttggataagagagattccgtcttgagcgtttttagacgccatgtctaaaccgcggatttgagaacgcattttttcagagatcgcaagacccgcagcgtcatcaccagcgcggttgatgcgaagacctgaagataatttttccatgttttttgcagcagagtttgaacctgcattcagctgacggctagtgttaagagccgcgatattgtggttgattctcattttgtatttcctccctgaattgtttttcgcacgtccttgtgcatttgcgcagcgtcatttctgaagaaaatttttcctctcattggctacaatatatatatcggacggccgcttccattgtttatattgaaaataaaaaaatcctcactttttttgtgaggataagttaagtaataaatcagtattaaaagatacggctctgttgttctcttccaggatcgacaagtagatttctttccggtgaatatctacgtgctgaggcgcttcaattcccagcttcacttgttctccttcgatagcgatcacctttatttcaatatccggcccgatctgaatggactcattcacttttcttgagagaactagcatgatcctcctcctatcagatgttttgtttcataggaagcatcatgtaaaatgatttgtttcgccttcatttcctttttattgacgataatcggcgcttttaaattggcggtcgtgttttcaaaaggctcttccagcgttaaaatcgccatcacttcgacgtcctctatatcttcaatatgcaaaagctcaagcgtcgcttggtcaatgtcaaattcgtaccctttaaagaaaataaacggactggcgacaataaaggcgatgtgctcctgtttcacagactgcagcgccaaaaacggtgaatcttccgacaaaggaagaacaacaaattgagtctcgtcattaaatcccggcaggccgttttcaaatgagataatctgcccttcatctattctgatttctccgtgatattttgttttaattatcatccttcacaatcctttaccactttcatcttttattctgcgttgccatcatcaaccgaaatcgtcaccttagggtcttgcatcatatcaatctgaactttccccggcgtataattccatacaggtttattgacagctgcttcaattgaaggtttgcgggcttcaatatcaatcgtaagctttgaaggaatgcagtcaatgtcgacgagaaactgcgcaggcagaaagtcgctgaattcgccgaatggatcgggcggactgacatctgctgcctgccgggccatcacattgcccgttttcttttcgatagccgccatttccttcccttccctgactgtttttgcgataaactcgctgcaggcttccgcacctttttgagcggcttcagcgttcagcttttcaaatgatttgagattcaagttctcccacgccctcgtctggtcaatcgtcagtttggccggcgtgctttcgatgttcagctctgccggcggctgctcgatttccaggtcagcgggcggctgttccatctcgatttcttccttttgaaaggttataccgattttagcaggcacactgtcaataatcaatctcggcatctgcacagagatccctcctgtttatagtattttagtaaaaaaagcgatctccctgttgtgagtcgctttttttatatattgaagacgatagttatattatttcaggaagtcgatcagtgacggctgaatgatattcgcattcactgacagcgctgctctatgaaccgtctgttgagataaataatcaacaattacatcttccatttctacatcctcattatccgacaatactttttcagcggttgccgcttgtgattccaatcttgtctgaatgagttccaaccggtttgtgcgtgcgccgatattggatttttcagcattcattttgtcagtaaaaccgtcgatatctgacagaatttgatttgaatctgcttcggacagcgtgcctttgcttaaagaagcttctaaggagttgagaaattcaaatacattatctccattttgtgcgacgcctccgaaagctgagtttggatcagaattcactttcagcactgctccgtttgagatgttgatgttaacatccgaagcaccggtataattctcatagttgtacgtatatgtgccgtcggcattttcagtgatcggcgggacatctgaattcgttccgttaaacagataacgtccgtttacctgagtattcgcgacagaaacgagctgctttttcagctggccgatttctgtaccgattgctttcaattctgtttcaccgttcgaatcacttttcgcctgaaccatcaagtcccggattttccccataatatccgtttccgagtttacgcttgattccgagttttccagccatgtaaaaccttgcgaaacattccgttggtactggtttacctgcgcaagctgagtacggtactgcattcccttcattgcgacgaccggatcatcagaagctttcgtgatttttttccccgtagacacttgctgctgaagccgatcgagcttgtcataacttgagccgataaatcgaagagaattttttgcgatcatcccttgagttactctcatttacttatctcctatcttcctccggtgcccataccgttaataattttatcgaatatttcatcctgcatcgttatgatccgcgcagccgcattataagcgtgctgaaactgaatcatatttgtcatttcttcatctaaagacactgcactgactgattgtctccgttcatcggctgaaagggtgttgctttcagagttgttcataagattagccgctttttgtgaattaacgcccagctttccgataagggattcataaaagtcattaattgtagtggtttcaccgttaatagtcagcttgctgttctgtacggctgcaagatttgtcgcgtttgtgccgtcacttttttctccgtttaacgacgctgcgatattatcagtagacgcaaggattttgtcactgacttttattttcgctgccgcaccttttgccggcaccgcttcatcaccgctgaaatcaaaaaatgctgcaccctgttcgcctgtataggtcttccctttttcatgaactgcattaaacgcgtcagcaaaggatagcgccatattgtcaagagccgtcagcatttcaggataaagccctttttcttctccgtttgacatatagccgtatgattcaataagacctaaaagtgagccttttccggtaaatgcatccgcattgaccgtactgctgccgactgacacactcgacacgagtccgctgtccttgtcgtagttgattttcatttctgaaactgtttttgtgttaccgtcgagcagcgttccgagagaattgttgttcccgttcagcaattcgacgttaaccgtgccctcagcagtcgccaaggcatgtccgcccgacttattatatgaaacttttatatttgccatagaagataattgatcaatcaatctgtctctttggtcatacaaatcattagggagcataccgctcggctcaactgccgctatttgattgttaaggtcattcagctgattgagaatggaattgacctgatcagctgtgttatccaggttctttttaatatcaccctgaatgttagtcaaagaggtagatatatagttaaaactttcggcaagagatttcccctgctcctgcaaaactgagcgcgctcccgtattttccggattcgtcgccagatcctgaagggcattccaaaatgaactgagcgatccgtttaatccgttattgtcaagctctttcatgacgccttccatttgcgacaatgaattggaacgggctgtatagtaccctaattttgtattttccgttctgtactgatagtctaaaaaactgtctctgacgcgctcaactgaaccggcttttactcctgttccgatttggccggccgtcagatcactgttttttgatactgcgggataagggctcgtcgattgtaatgtgacgcgctgcctcgtatatccttctgtatttgcatttgcaacgttatttgaaactgtgctcaatgcagtctgctgcgcactcaatgcacgccttgctgtttcgagccccataaaagtcgatggcattgaaaatcctccgttctaagcttttgaatcgaataatgtcaaacggctgacaggcttgcgcgccgcttgcggctctttataattcatattctctttttcacccggcatgatcatatcgaatgccccggagatgaattgtaaagcctgaatcgtgagctgtttgttcatctcattcacttctttcagacggtcaagaagcgcagacagagagtgaaataacccttcaagctcctgtttttcactgcctgaagttctggagatgcatgcagcaattgtattgtcctcaccgcggctgagaaactgagaagttaacctgattcgttcttcctcagtctgcccgattgcctgaatatacttttgctctttagtcaatatgttggagagctcttttgttttacctgctttcagcgcttccgttttctcctcagacagcgtgagcagatgttcatgcagtgcgcaaagtcgcttcagttgatcaataattggctttgcagacattgactttctcctttttattgctttttataaaaattcactatgttttcagcgatgctgtttgaatctattttatatgttccgctctctatatccgctttaagctgagcgattttttcctgacgtgttttagtgaccgcatctgacgcattttgaagctcttttgcatgagaagaaatttccactttgtccttcggctttgcagcctctttttgtacggcttgcttttcgtaatttttttggtatggattaacggattgtgttccgtactgattgattttcataggattcctctcgctttctgttcgcagtctaattcttttatcgactgcgttatcagttagtttagggaatcaggtgtttttggtattataggcatagtatgtgtcttttgtactgtttttttctttgaattcagcggctgttttttggttcatatggtctaattgcgactcaatatctgtctgacaggacttgcaaaattttcctgtcctgatcggatttccgcacctttcgcaaggatatgccaaattcggaagctggctgatctgaatccttttttgtttgataaacttgaggatcagctcttcatccacacctgtttcctcagtgatctgctgcatcgtcgactgtctgttgatctgctttctcaaaaaattatagacggtttcaaatgctttttcttcttctttaatacatgcctggcacacggtctgcaggttcgttttaaaaaataaagcattgcattttggacaattcgccaattcacccatcgtattaactcctattccttctttaatctgccttatatttctatcaattatatcggcagaaaaaaagaatgatttagctcctgattaaagtaaaagaggagaccgatgacgctttacccgctgtcagcaggacttcggcggcttgatgcagtgtggcgcccgtcgtataaatatcgtctattaagatgacgttcataccttcggccgagttttcggctgctgaaaactttttttctgcggacagcctttctgttttgctctttttggattgtttttcattgttcagtcggatgagggggaaaatgacgggcattccgagcagagaggccagcagctcggattgattgaatccgcgttccgccagccgttcgccgctcagcggaatagggatgagagtatgtgtatttgatggatatgccgctttaaagccggcagcaaagtcacgtccaaatgcttgaatgattttcgcatcacccctgaatttaaaccgggctaatgagtccttcatcgcatcattatacaaatataccgaacggttttgccgcagcaaaaagcgcttttccgtttttgattcccgggccgcacaatcagcgcatttttcatttgactcctgaggcctcccgcatatactgcatacggggccttcaattttttcgaatcggctgctgcatatggtgcatacctcttgctcgggcgccagagaaaacaaagatctccaagtcaatgaacttgaaattggtgagtcacacaataaacaattcagagatattacgctccttcccaagtttcacagaactcgcttggattaaccgaaacaatcgcggctgattcagccagaatgacaagcagcgccgtatttttctgtttatcaactatctctgcttttgcataagcaactttctttttatctgtaacatatgccggctcagcccggtttaatgaaagtgccagtacatcatttttgcatacccggcatgtgcatttcatatgaagcttaggcatatggcggtcgagaagttcctttaatatgatttctttagaattgacaagcatgctgacagctcctcataggaaagtatgagtatactgtatcatgttttctgaaattaactagtccaacaatttacttttttgtgccaatttgttcataagttctatatgtttttttgcttttttcattccgtttgtcattccgaaatgaaacaggacgacatcaccgctgaaatgtttataatgccttcccgttctgcccgcgatctgtacgagcgcgctctcagtaaagataggtgcttctgcgccgaggacacatgtctgaactttgggcacggtaacccctctttctaaaatcgtagtcgttaccagcagatcaagccggccgtctctgaatcgtttcactttatcctttctgaatgtgtcttccgcatgtacgccttctgcccgtatgtttaatttctgaaaataatccgttgtctttttcaatacgtgtacagacggaacgaataagaaaaccggcagctgtgattgaagtttttggcggacccaatccgttacagagcgcggcagttttcctttctgaagcttcttcttccaattgccgcaccacaaaaaacgcggctccggcaggggtttccgatgatatctggccggtatgcgaacgcttttcagcaaaccggcttcagcattcttttttaatgtgtctgaaggagttgccgttacataaacaagggcgctgtttttcttcctcgctttatcaacagcgaatcttaatgtctcatcggctgaaaaaggaaacgcatctacttcatctattatcatgacatcaaaaatgtctcggtagcgcatcagctggtgagcggttgaaatcatcagcggagtcaagcggcctttgtcctcgctgccgccgtacaaagcagaaacgtcgactttctcaaatgcttttttcagtctcggcagcagttcaagtacgacatctgtacgcggagtcgcgacacagacgcgcaaaccttgattcagggcaaactcgataccaggaaacagcatctctgttttccccgatccgcaaaccgcccatactaacagctcttgtctctcttttatcgcatctgtaagcgcggcggcggcctgcttctgtccgtctgtcagtgttccttcccaagaaagctttacaggctcccagctgttttcaggggcttgattccaagaatataatgatgtcagttcatcagcccttcccatcatgacacaggcacggcaataggtaatctgccttttggcagagggcgcccaaaatgccgcaaagcaggcttgatcagactgaccgcatcgttggcagacgtaacggtttttccggcggatgattgacggctcggccgttatatgctctttttctataaaacggttgatgcgctgatctgaaaacggtatctcagatctcaataaatgccggccgtaaaagaaatcccgcacctctgaaaattctgaagcaccttcggacatctccctgcctcctttctgttcaaagtatgcctgccgggaatttttttgtcgaatcacgaaaatttaataataaaaaaatctccgcccttgaaaacggagattttcacttagtttttaaagcaccagccgattccgatggcgccttcgcccaaatgggttccgatcacggcaccgaaatagctgttatagaattcgacatgaggatatttaccgcttaactcctgtataatatccgccgcttcttcttccctgtttgcatggatgacagcggcccgcatcgggattcctttacttgcatcctccccaaacagttcaaaaattctcgaaatcgcttttttgcgtgtccgaatcttttcaaaaggaacaattatcttattgtcaaaatgaagaataggctttacctttaacagaccgccgataaaagcctgagcactgcttagacgcccgccccgctggaggtgtgataaatcatccaccataaaatacgcacggactgtttttttcatttcttccagctctttaataatctcttccggtgagtcaacaccgtctttaatgagctgtgctgcctttaatgcataaaaaccttgcgccaaacagctgatctctgaatcaaagggataaactttaatatgatcaaccatagtgtttgccgaggcggcgctgttataagttccgctgattccgctggacaaatgtatgcttatgactgcgtcatatgttttgcccagttcttcgtacaatgcgattaattcaccgaaagaaggctgggacgtagtcggcagctcatcatgattttttacttctttataaaaacttctccagtcgagttctgtttcttcgcggaatgttttttcaccgaaaaccacttgaagaggaatcatatgaatatgatgttcttctctcatctctttcggaatatatgctgtactgtctgttacaactgcaatcttcatcactttacctgccttattaagtacttaataagtattttaatagatatgaagctgtaaaaaaagacttgcctattatggcaagtcttctcatacatgactaacgcatctctacccagccgtttttaatggctacgacaacggcttgtgtccggtcattaacgttcattttctgcaaaatattactcacgtggtttttcactgttttctcactgataaacaatgattcaccgattccgcggttgctttttccgtctgcaagcatttgcagcacttcacattcccgtctcgttaatatatgtaatggtctccggatttccggataaacctcatgctgaggatgagcagaaactccgcttgtcgcaagacggcggaattcgttgacaagattgtgggttactttcgggtgaaggtaagaaccgccctcggctaccactttcactgcttcgattaaagtatctgcgtccatctctttcaggagatagcctcttgcacctgtttttaaagcatgagtcacatagttttcatcatcatggatggagaggataatcaccttagattcagggtacagctcaacaagctgtttagtagcctctactccatttacattcggcatattgatgtccattatgacaacatcgggatgataatgctcgacgattcgagccgcctcatctccatcgtcaccttctgctaccacttcaaaggtaggttcaaaatccaatattctttttacaccctcacggaatagttgatggtcgtcgataataacaatatttactttagtcacacgctacgcctccttatcctattgttctatatacgccgctgttcggtcaatatgtcttttggctctatttaacaaattataggccgagagataacggaaccttaatcatgataaatgtcccaagacctattttagagtctatcgttatcgttccttcaagcagatctactctttctttcattcccagcaagccaaatgacttgtttttcttttgtttagcatccttaatatcaaagccttttccgttgtccttaatgataagaacgacaaaatcagcggttacttccacttttactgttatttcctctgattctgaatgtttgagtgcatttgtgacggcttcctgagcgagacggaaaagcgccacttcaaattgcggggcaagccttttgttctccgtgtctccgatacactgaaaatgtattttcacctttccgttgtattcttcagttgtataaagatattttctcagtgtaggaatcagcccgagatcgtccaatgccatcggtcttaaatcatatataatccttctgacttcgtaaagggcattccgcacattctgccgaagatttttgatttcctgaaatccgtcctccgtgccgcggtcgcggaagatccgttcaattaattccgatctcatcatgacatttgccagcatctgcgcgggaccgtcatgaatttctctggaaactctttttctttcttcctcttgggcttcaatgattcttaagccgaaatcttgtttagcctgcgcatcggcaagaagaagccctacttggcgaaggtcttgattcaggtaattcagaacgacggttatttggctgaccaatgattctgaccgttcaatgatttcctgaagccccaaaagccggcgttctaaatcatctctgcgctcccgcagctgcttttcacgctgctggatcatcgtcagttccacttgaagtttgtgcgccttttcataggcgttgcgaatttcttcttcgctgaacttatggaaatttctgcttacttcagacaagcggtttcgtgcgtgccgcgtatgaacttcaagtttgtcccccagctcaatgacttcgtacacctgctgtttgatctgtttgagttcttcaaccagctgctcatattgctggcgcgactgctctccgatttgaaaaacctcgtccttgctcccgtccacggttttcagcattttcataagtatagaatccaaaactttggagtccatcttcgatttattcatctgtctccctccgtaacggtgttgttatgtatttttattataaatgtaattgaactgcaatttatgtcgaattataatgaaagaatgcgtatattctagaaaaaaacatttttatatagtatcttactctttcatgataccaaaatatgcgcaaaaattctaaagtctgttcgaatttgtagaaacaagtcttttaatgcttgtcaggagggtccagcaatcatgctgcacagctatttaactgttaaagaaacgggtgaacatgagattgtgattgaaaaatcacgttttatctgtcacctgagccgtgctgcttctgaagaggaagcgcaggaatttatacaaaagataaaaaaacagcactggaatgcgactcataactgctcagcttatctgatcggcgaaaccgaccatatacaaaaggccaatgatgacggagaaccaagcggcacagccggcgtccccatgctggaagtgctgaaaaaacgcggtctgaaagatacctgcgcggtggttacccggtatttcggcggaataaagctcggtgcaggcggattgattcgtgcatatgggaagtcagtgtctgaaggcttaaatcatataggagttacggagcggaagctgatgcggattatgcatacatcagcggattatacgtggctcggcaagatagagaacgaactgagagaatcagtttttttactgaaagatatccattatgcggatcatgtcgaatttgaaacgtacgttgaagaaaaagacaaagaagcgtttctaaaatggatgacagaactgacgaacggcaagagtaagaatacagagggagaactgacgtatttagaaacagacgtcagccctaaaggagactaatgtaatggctgaacgtgtaagagtgcgtgttcgaaagaaaaagaaaagcaaacgaaagatcatattcaaacggattttgctgctgcttaccctcgttttgttagttgctgccggatttggcggatacaaagtatacaaaacgatcaatgcggcagataatgcatatgatgccctttcccgcggagaaaaatcaaaattgcgggataaagtcatcaatatgaagaaaaaaccgttctccattttgtttatggggatcgaaaattatgccaccagcggaaaaggcggacgatcagattctcttattgtcgttacccttgatccgagaaataaaacaatgaaaatgctgagtattccgcgtgatacgcgggtgacgcttgccggcgacacaaccggcaacaaaacaaaaatcaatgcggcttttgctaagggcggagcggatgaaaccgtctcaaccgtcgaagacttattaggcataccgattgataagtatgtcactgtcgacttcaatggctttaaggatgttattgatgaagtaggcggggtcgatgtaaaagtgccgtttgacttcgacgagatgagtgacgtcagtaaaaagaaacggatctatttcaagaaaggaaacatgcatttgaacggtgagcaggctttggcttacgcgcggatgagaaagcaggataagcgcggagacttcggccggaatgaccgccaaaagcaaattttaaacgcactgatcgaccaaatgtccagagctggaaatattgctaaaatcgataaaatcgctgaaacagcgagcaataatgtccaaacgaatatccgaatcactgaaggactcgctcttcagcagatttacagcggatttaccagcaaaaagattgatacactgaccataacaggatcagatttatatttaggcggaaccgcaactacgcgcggaacatattatttccagccggatccaaccaatctcgagaaagtacggcaggaattgcagaagcacctggattacccgtccggaaacagcacggcatccgatcccgcttctgacagcaccggaacggacagtacgactgattcaacttccggcagcacaggaacaggcggtacggctgattcgacttccggcagcacaggaacaagcggcacaaccgattcaaccaacggtactgcaggtgcaaacggtacggacagcacacagtccggcggcacaacaggctattaagagtaaacccgatcctttgagcaggatcgggtttttctatataataagagaatagcaaaaaagcagaccattcgcatgatctgctctttttaatttttctttaccaatcttttgtaaaacttggtaaatggtttaaattgttcatttactaaccctgtgacctctgctatgatttgcataaatacaatcaatacaaaaataataaacagcgaaagccaaatggtcgcgcttttcagcaggatggcactgacgctgaaaataaagccgattaaataaatgataatgacagccgtgcggtgtgacagcccgaaggccatcagccggtggtgtatatgtgacttatcaggcgctgagatcggctgtttgtttaaaatccgcctgatgacggcgaatgtcgtatcaaaaatcggcacgcccaaaatgatgatcggaatgatgatactgaataaagtaacacttttataaagacctaataatgagagtactgagatgacgtatccgagaaagagcgatccggtatctcccataaatatctttgccgggtgaaaattataaaataaaaatccgagtgtgcttcctatcacgacaagtgaaagtgacagaataaggattttccctccggacaacgccataacggcgatagtggagagtccgatgaccgacaggccggcagcgagtccgtccaaaccgtcaatcaggttcatcgcattcgtaataccgacgatccataacacagtcagcgggtaagcgacccatcccaattctaaacgttccgttaaaaacggtacggagaaaaagtccattttcagtcccgtgctcacaatcataatggccacggccagctggacgaaaaactttacctttgcgcttaattggtatttatcatcaaggattcctaaaataacaataataaacgcacccaccgtaatggcggtcattttcgtttcattatatatgccggccgcgagcacacccgccgctacgccgataaagatggccaagccgcccatacggggcattattttatcatgtacttttcggttgctgggctggtcaactgcacctattttgatcgcaattttttttacgataggagttaggattaaaaccgttagcagagagacaaaaaacgcaacaactatgcgaaacatgcgttcgtcaagcataaagaagtctcctttggaattatatgaagtcttttctgatattgaaccgttccttccattataattcttactagttattataacaagcatcatcaaaaagaaacacgcaaatcaaaaaatgcgctttcccttttaatgggattgcgcattttccaatatacccgtgcattcaagcattcggccgaataaaacattccaatcccgtccccgggccaattcacggcgcaaagcctcgtatgatccgcggcggtccgctgccagaagcgcttcgcaggccgcgatgaaatctgcggggtcgctcccttcaacgtattcataaacgtaaggccttttgatttttgacgtagaagaaaggttgcagccgacaaccggtttcccggcggctaaaaattcaaaaagcttaagcggaaataccgcgtcattataaggtgaatttttatacggcatgatgccgatgtcgacaagctgcatataggacggcacttcattcggcgcggcaggtcccgtccagatgacattcgggcgttccagaagcgactcgaaatccggatcgtcctgagccgtgttcgggcccaccaataaaatcgtccagtcaggccgcaaatctgccgtttccgccataagcgcaaaatcgagctttggtttgattccgccgataaaaccgagaaccgttccgtttcgtccccgtaaaatgtcttcatccggctgtttattttcccgtgaaaacaggtcatattccactccgttttcaatggtgaacactttctggtgcgggttctccagcttttttccgacctcccggtgcagacagtcagatgtgcaggtgatggaatcggcacgctgaatgattctcatttccgcctgtttaatgatgtttcttcttacatttgacagcacaccggcccggccgctgatcggagcggcccacagatcactgcaatcgtaaatcacttcatcccaaggaaacagatctgccagaagcgggaaaccggggaaggtgtaccataagcagcagcgggccccttctccttcttccttcagcatgtgcaacaatggtgaaagtttatgcctgtaacacatgtctgtatacctgccgaaacggaatgctttttgctgcatgagatcctttacagtgaactgccggattccctcggcgatcccggccatctgatcatcattggctcgcggggacgggcatacccaaatgacgcttttcgtttctttttgccgggcaagaaattcagccagccgatgccgtctgtatctcagccggtcatgcccccattccgccgctccgacgattacgtgaataatcggttccaccttcatcacccagctcctctgacgcctacagtcttttcaagaccgcgtttttcgcatattgcataaaacaccacgaagccttgataaaatgcaggcgctcaatttctctataaacaaaccacgttttttttgcggctttccacttgttgcttgaaatcgaattctgcacaagcctgtattctgaaaggcactcattcaggccgtaagccgtaaatccccttttcagcagggaaagccatgtcgctaaatcctgccgcgttctgatatcaggcatttgaatctgccccgtctgctctctgtcaatcatgaccgttaaacatccgataatcgtgttttttaaagcttcatcatatgacaggctttcaggggcttgaatcgttttgtccgtcggcgttccgtcctgctccatgacgctgtagcccgtaaatgaaaaagcgcaggaccgctctgccataaacgcaagctgtttttgaagcttttcctttttccatctgtcatcgctgtccagaaatgcgacataacggcccttggcatgtttaagggctgtatttctggcagctgcggctcccccgtttttatctaaataaacgacgcggatccgctcatctttttgttcatattgccgtaaaatatctctcgttccgtccgttgaacaatcatccgcgataatcatttcccaatgcgggtggctttggtgtaaaacggactgaatcgtgtcttcgatatattcacttgcgttataagacggtgtaatgacagatacgaaaggtttccagtttgtcatggtcacatctccatcgcagatttttacaaggactctctaaaaaactcaggaatgacaatgaacataaaggcaactgcaatgccgattaaaacgcccagaaccgctttctttttcggcggcatgccttgaccagccgtttcattcatcggctctgaattgatgacgccggccgctttcaggttcagctgcgtatttttcaattcgtataaaaatcgttccttatccactttggcgtccgcgctgacggtttctccttcaagcgcagcaatactctgccgcactacttttgcccgtttttcaaacaggtcctgatcattcttcagaaaagttgttatgacggcttgaaacaccgattcggtttcctgtttgttttggccgctgcagctgaccgtgatcaatgaatctgattgtgtttcgacagtcagtttacttttcacggccgctctttcttcgtctgttttatgaggcagagcctgctttaaaaaggcatcgctcgtcaaaaggagcgggatttcttttgtattgttataaagcggatgatcataatttcccgcggcgatcgcggcttctgatgtaaaactgctgtttccgctgatttttgacggcaatacatatcccgccgcccctaacacaacgggcagcgcaatgatccaaatgatattctttttgatacgccgggttattcttgtcaacatatccttcatctcgcatctccctgtttttcatagtacgccgtgacggcaggctccttttgtaaacgcctcaatatattgaccgccgcgatcacgagcgagagaaatacccagtggaaaaataaattcgatacggagcttgggctgatgctgcttaccaaaaaaccggccatcgccgtgataagtccttctgtgatcagtcttgactgattttccgattttctttcatgacatttataaagtgtccaaaaaaggaacaaatagactgtcaggtaaccgagcatcgtaagtacgccgaagttcgccataatctcgacgagccagttgtgcacctcaactacgccgcccgtatcataaacgggctccgcttttaaatagtaagagacgtttccggcacccactccggacccccaggaatcaattacatagtgaaaggcgttctttaaaagattcgccctggcgaggttggaaggaagcggctgctgtcccggcatcgcctgcggagctgaaaacagattcaagacggcattggtgatacggcccgcaaataaaaccgcaaacagcgcagcacccgctcccgcagcgtacagcgcgaattttttcaacagagaaggcagcaggatgaagacgtatacagccgcccccgcgcatatgcccagcagactcgcgcgcgaaccggtcaaaatgattaaatacaaagcgcagatcgctaagagcaggctgacggccttcacatagccgtttttcatatttttcaccgccgccgcatacagaaagaaactgatgcacaaaaacgtcgcgaaatcattttgattaaagaaaacggacgtcggataatgctgtttgtactgcgggccgttataaagcgtggagctcggcagatggttgtgtgtaaaatggttgtaaaagccgatcgccatcacaaaaatggtcatcacaagccatatgccgtaaaaaaccatcagctgatcaaagcgctgaatgaacatgacaataagataaatcaaaaacatgcccattcctattaaagctaaatatttaatcccgtacgtcacggattttgcccacaataacgataggagaccgtatgtaaaccataaggcgaaaaacatcagaaccccttttacattcacccgattccatctgtcaatatgatgacggtttgtcaggatgccggcgatgtgtagggcgcccgctccgattaataacagccggtatataaataagctgaaaaatccgagatgaaccgcaaagaaggcctggtttaaaaatgtacacgcgatcagtatataaatgagccccataaacatctgaccgtttgttgtaaaggcggatagcaaagcaagtccggcaataccgatcatggcggcaagcagcagcacggtgatttttccgaggccggcatccgccctgaccgcctccagcatgatgaatcctcctgtaatgacagcggcaagcagcacaagaacatgtgccgctgaacgtttgatactcacatggcaaacccctttccaaaaccggcagccgagccgggctgccgagagcctgaagacaaatctttttctatcttgccagttcttttatttgccgatcggcatgaaccgccggacgtccgacggaatgataagtgaatcctgaaaccctcatatactccaacggaaacatatttctgccgtcaatgatgaccggctgtttgagcagccgcttcactctctgaagatccatctccttgacttccggccaatctgttgtaatcaggcatgcgtccgcgtttttgatggcactgtacatctctgcgtgatattcaatgccgccttctcctaatatcgctgccgcttcgggaatcgcgatcggatcatacgctttcacgtgagcgccctgctctttaagacttgtgatgatatcaagagccggggcggagcggacgtcatttgtatgcggtttaaaggccagccccagtacggccacggttttcccttttaagggaccgatggcgcggttcaatttttccgtaatacggaccctttgcttctgattggtttcaatgacggcttccatcatttcaaacggatagccggcggcgtttgcgatatgcaataaagccattgtatccttcggaaagcaggatccgccgaatccgatgcccgcctgcagaaatttattcccgatccggctgtcaagaccgacgccttctgacacgtgagaaatgtccgccccgacacgttcgcaaatattggcgatatcgttaataaaagatattttggcggctaaaaaagcatttgcggcatacttaatcatttccgcgctttcaagattggtctttacgatcttcgtacggaacggcttatgaagctcttcaatgaccgaagcggcatgttcgcttgtggcgccgataaccgcccgctccatctgcatcgtatcccgcaccgccgaaccttcgcggaggaattcaggatttgacgcgacatcaaacggatatgttccctttgacgcttcgctgacgatttggtaaacgagctttcccgtcccgaccggaacagtgcttttggtgacaatgattttgtatccgttcagctgttctccgattgtttgcgccgctgccttaatgtaggtcagatcggcttcacccgtctttgacatcggcgtaccgacggcgatatagatgatatcagcggctttcacagccggctcaatatcggccgtaaaggataaccgcccgtcactgacatttttttcggctaattcctcaagccccggttcatatatcgggatgactccgttttgcaagcttctgattttcgcttcattgatgtcacagcaagtcacatgatggccgatttccgcaaaacaagttccagatacaagacctacataccctgttcctaatacagcgatttttttcacagcttcatccctctttcgaaaggttctcctcttgcccggaccggttcatgacggaccggtatttctctttcagcgctttcgcgttttggcttgcgtcaaaatacgtgcggacggtttgataaagttcctcggctgtttgcggcgtccaagcctctccttcgtcatattgcagaatggattctgccagcgtgccaggtgaacccggcttgatcagcaaacctctatatttcccaaataaagaagccaatcctccgacatcggtacagatcaccggcaccttcagagcgagcgcctcaatgaccacagtcggcatgccttcgctgtaggacggcagcgccattacatccgaggccagcagatagtcctgtaccttgtcgttcggcacttgccccgtgacgatatgagcggcttcacgcaatgaagatgcggctggaccgtcaccgacaaagacagcttcatatctttcatccaatgactgaacggcttttgataagtcgaaaacacctttctctttgacaagcctgccgatgaacacgatcagttttttatccggaggaaggccgagccgttttctgacggcttctttcgtctcgttcctttttcggaaggcgtcaagcgtgatgccgatcggaagcacgctgcactccgcttcgatgagctttttcatttgttcccgcagactgccgctcacagcgtaaatatcggctgcttcccgcaccgcaaatgtaaatgcgcgatgagcgcttttgctgtaatgcggatagacattgacatcactgccatgcaaggtcagcacatacgggatgcctaaagcctttgacacaatggcggccgctccgcctgacggcatggcgaaatgcgcgtgaatcagatcgggcttcaggccatgatttttaatttcggaaagaaccgatgacgccattcttttatgcggctgcgcccatttcagctgcccgggaaccgcctgataaaacggccggtggacggacacgcctttccgccattcatgcgccggccttatatccttttgccgatacgtctttttcagcacccggaatggcgcggcgagtttcggccggggacaaatgacagtcatctccgcgccaagctttctcagttcttgggcctgcgtctcatgaaaaacgccttctcccggcttctcactgctcggatatacacttgtcatccacaataccttcatagcaaacgtccttttcttaatttacttttcatatgcggataagcttttcctaacaggaacaaataacacaacgctccgcaggatacggagatcgccagccgcagcttgacatcaaggctgatccgctccgtcccgaagctggctgtaaaggcgatgacacccattgccgccgtaagcagaaacggtttggccacggctttgaagtaagccgacagccgcagcttaatgacatatgccagcagccagcgcccgatcaggaaattcaggatgctgatgaaagcgtacgtccaggctaccgtcaagagatttccggacagcacggcggcgtacaaagatgcaccatacagcagcatcaccccggcgtcccaataaaatgccagatcggcccgcccttttgccagcagcacagatccgttcggattcatcagaacccttaaaatcccgacgatggcgagaacgtttaaaaccgggacagccgccagccatttttctccgaaaaccgaagccacgaatgcatccgatactgaaaccaaaccgagcaaaagcggaaaggatatcagcgcgagtattttggtcatattgagaaaaccttctctgatcacgctgttttcatgcttgtttttcgcaaagacgggaaacgcgactctcgtaatgatcggattgatttttaataccggaagcgtgacaatctggtaggccagattgtaaatgccgagcgcctcggcgccgataaaactgccgatcagaatcatatcaatattcgccccgagccggttcacaagccgggaagacagctgaaaggctccgaaagaaaagaagcctttcattcccttcagatcaaaaacgaacaccggtctccatgtttttctgcaggacacccagtacagaataccttttgacgattgcagcagcacctgggaaatcacataggcgagaatcgggtccgtataaaaaaccgcagccgccaagtaaacgaaggacagcacatttgaaaagatttcaatcttgcttagcgtgttaaatgccagcgctttttgcagcatatattgatattgctgaccgatcggcgcgattaaaaacatgacggccagcacgcggattaaatagacaagctcctcccgccgataaaaatcggcaatgagcggactgctgaagaacagcagcgcaaacagcgcaagccccgttatgatattcagccagtacaaggaagacatctgtttatcagtcacatgatctttttgaatgagcgcggcgccaaaacccatatcaagcgcaatttgggcaaacaccactaccgttgtgatcatgccgacaaggccgaattcagccagtgacatgacccgcccgagcagggcgaattggacgatttgaatgaccgtaatacacgctgtcgaaatacttgtccatttggcgccgctcaaaatttgatttgtaatactaggcatcgttttccctacttttttgtctgctgaccagaatttttatcgcgccccgtcaccggtccagatcactttgcacgttttgagcataatcttcagttccaatgaaaaggtcaggttgcggatataatataagtcaaacatcagtttttccctcggtgtcatgtcatatcccccgttgacctgcgcccagccgcttaatcccggcttaacggccagccgctccgtaaaccccggaatctcagcctgaaactgttccgtaaacacgggacgctcgggacgcgggccgatcaggctcatttctccccgaagcacatttaccagctgcggcagctcatcaatacgggtccttctgataaaagcgccgacctttgtcacgcggggatcctttttcagcgcccagaccgcccccgatttttcagcatctattttcatagagcggagcttatacaaataaaacggcttcccgtctttgcctacccgctcctgcttgtaaaaagccgggccgggcgactccaaacgaatcagtatggagaacaggcccatcaccgggagcgccgccaaaagccccgcaagcgcaaacacaatgtccatgaatcgcttaaaagccaaataacgggccgttctttccgtaacggcagcggaagtcccctgccgcactgcatagttattatttacattcatgcttttctctgctcccactgacacacacctcacgatttgttgggatgtttgatgacctatgccgtgagtttagcagatggatgttaattggaagtaaaggaaacgttaatgtttattagaatgtttcgattattgtttttttattgtaaatctattcatatccatatttgagacaaagcataatgaaaaaataaaaaaacagaccggtatgaaccggtctgtttccatgaaaaaaattatctgaaataggaggaaacgccttgggtgatccccgccgcgagtctgtcctttttcgttgattgttttagaatattggcatcaatcgggcttgtgacaaaaccggtttctaacaagacactcggcattttagaatacttaatgacgtaaaatccggcagttttcacactgcggtcacgcgtgccgagagcagaaaccattctcggctgaatattttgggcaagcctcagactgtttgccgattggtaggttttatcataatacgtctccgtaccgtttgcactgctgttatcattcgcatttgcatggacgctgatgaaaatatcggcgttcgccttcgcccctttgttcactctctcctcaagcgaatcaaaggtgtcgccctttcttgacattacagtaagcgcgcccgcgccgtataattgattgttaagacgcgtagcgatatcaaggtttacatttttctcaagcaagccgtttccggttgcacctgaatcctgatagccgtgtcccggatcaataaagaccgttttgccgacaacgggatttttaagctgcgacgcggcattgttgcttaaagatgaagcacttcctatgacggtgaagctggtgatgtttttacttccgatatacgtccggacgtcttttgacagactgtctccattcgtcagcaggtgaactcttccctgtttggcgctcagcacgcctccgacgatggtatccgcctctttaaagccattggtaacaaacgtatagcctgtgcttaagcctgtcttttttgcaagattcacagacaggttatagcggtttttgccgctgattctcgaagggttcggcagcttattataaagtgagctgctgatgctgcttgtcccgccgatgacaatcgtgtttttaatccctaagcttttgatcgcattggacgcagaaccatttaacgttgaatcattagtgaataaaatcggatattttttagcggacgcataagaaatcgcagccattccatccgcatcaacaaacccgttgaccacaagggctgtagaagatcttgtcatttcacccgccacttttgcggctgtggcatatctcgtgctccctgataaccgtttgacactgatgcctaatttagcaatttgatttgcggtatttttcgaaacggcaggtgtgccgcctacgataatcacatttttcgtttttaaatcaattaatcccttttttgtgccggcagacagctgatctttatttgtaaacagcagcggcgcatttttttgatatgcaagcggcgcagcggcaattgcatcggcatatgaagttccgccggtgataattaccgttttcgcttcaccccatgattgttttgccgccagtacagccgtatcataccgggtgcttccgccgatccttttaaccgtgttgtcagccaaagcggaagggacaaatagaatgaccccgagaataaagacggggagacattttatgatgaatttcaatccgatctcctccacagaagtttagtagtttgtaagtgctgtattaggataatagaacgcaagaatagaagtatacggctctccggcctccgctctttcttttgctccgtattgactcattcctacgccgtgaccgtatccctttcctgatatcgtgatttgcgaagaattaccggacgcactggcgtatgtgcttttaaaagatgaagctccgatcatcgtcctaagttcagacgctttcacctcaacagatgcagtcttgttcatgacatagcccttcgacttgtcattcacatggtacgtgaccttcaccgcggcgtcttccgcgcgctggccttttgtttttccggtgagcgagagatcagagatacttgcaatttttatggaacttgcattggtttctttatttttcatcagccaattttttattccgttgagctgcgcagcatttgcttcgtttgttttagaccaccaggatgcgggatttttcatatccagacccgctggcagctgctgcttctgcaatgttaaagaccagctgatttcgggatcttttgtgtcctttttggctactaaatacggcactttcgatccccacacttcatcgccggcttccatgtaaccgccattgcttgatgagtaagtggcatctatcaatctgccggaataagtgagcactttcccttttgttccgttaacggctgcggtggcgtttggataccagctgtatcccccgtaaacctgaaaggccgttgtatccgcgactgtttgtcccatcttgccgatagagtaggtgcgggcggcaacagcctgggctttcagcgcttctgtcggccagcttcccggcatttcattcggcaggacacctttcagataatcctcaaaaggaatgttttcattaacaggtcttacatatttgccggattcagcagtgaaactcatattccccagatatggcttcccgtcaatgctgattgtgtttgctgttgaatatttttcaggaaccgccttgaaagacgtttttccgctgttaatgcctgcaacgcctaatttgccgccggacgtttcaatacggtacgtctttccgtttacgagataaaactcttttgcgtaagcagccttaactgaatcggcaattgaattcgcgctgcctattaatgtataagaataggtgcctttcgttttaaaaaggccggcctcgtcggcgggtgtttcgctttttttgatgtatacaagcggcatgtgatttgcggcggcaatatttgatccgactacgatgtccgctaatttagtcccgttggcagccaccgttttgcttgcatccatgccaagcgaagtgactgcgtttgctgatatttgatatctgtttgatccggtaattcgtttggtgaccgaggccttctttttaatttgattctccacatctttgctgacgcttgaagtgcctcccatgatgatcacttttttaggcagattgtagctcggaagggagtcttttttcgtcagaagaatcggatagccgttttgcgcggcatatggcgcgattgccagcgcatccgtatatacatcccccgttactacgaccgcctggtcatagctgcccatttcggccgcaatatttttggacagatcatatctgttttttccgctgatccgtttcgtacggccgtatttcttcaatgtcttttccgcggctgacgaaatactgttcgtcccgccgatgattaaaatattatccggattgaatttcttgatttgcgcttctgtgctgctgctcagttttttcgcttcagtcagcagaacaggcgctttcagtttattcgctaaaggaatgacggaaagcgtgtccgcaaaataagcgtccgtattcacgacgactacgttggacgggtttttccaatacttagatgtcgcggcgttagccgtatcatatttggacgcgcctcccaatctgacaacggaggacacatcgcttcccgtcagtttataagttcctgaaggttcgatattcagagtcgatttattaccaatataattcgtcagttttactgagatatcagaactggccgcaaaagtgctttccggtaataaagccaggctgaatatcacagaaaaacagacagcccatattgttttcttcaatttttatcccgccttttgctgatcatggtgtattattttgctttctcgatttccttgatctctttttggcctttatcatttgtgaaataagtaatgctgactttgtcattttcgctgaatttattcagaacatcagagaagtcatcagaaaattcaaagctgacgggctgatcatccacttttacttcaattgtgtgcgtatccgccataccgatataatatgccgtttctttttgagcctggttctccgaagaaccgcttcccttctttgattgttccgccgttccgcacgctgccaatacaacagaaaaaagcagtattaagaacgaagctgcaatagtttttttcatttttttcacctcatctttatgtatcgtcttatactaactttttttaaggtaattttaaggtctttttgtaaccttttttttaagaatttcgtctattacatggttataagtaaaaatatgactgggtttataaagattagtaaattgcatcatgaaagttaatagaaaaggtgatgacaaatgagagctgaacgaaaaagaaagaagaaaaaggttcttctgacaatcgtaacaatcatcgggctgttagttttatcatcaggaggctacgtctactacttgtggcacaaagcggcttcaacggtggcaagcattcaggaagacttaaaaaaatcggacaaacgtgacacggatatagatctcggaaagaaggatccgatttctgttttaatcatgggagtcgatgagcggaaaaatgacaaagggcgcgcggacacgatgatttatatgaccgtcaatcctaaaacgaatacaacggaaatggtcagcatcccgcgcgatacgtatacgaaaatctccggcaaaggtacgatggataaaatcaaccactcctatgccttcggcggaacccaaatggccgcggataccgtcgaggacctgctcgacgtgccggtagattattttgtgaaagtaaacatggagagcttcaaagataccgtggatacactcggcgggattacggtgaacagcacgttcgccttcaactacgacgggcattctttcggaacggggaacatcagcctgaacggcgaagaagcacttgcctacacccgcatgagaaaagaagacccccgaggggatttcggcagacagcagcggcagcgccaagtgattgaagggattatttctaagggggcaaacatctcgtctgtcacgaaattcggagatatgtttaaggtcattgaaaacaatatgaaaacaaacatgtcattcgatgatatgtggacggttatgactgactataaaaatgcccgcagcaaagtcactcagcatgaactgaagggaacgggaacgagaatcaacaatatctattattacaaattagatgaagcaagcctcgcttcagtcaaaaaagaattaaaagaaagcctgaaataataaaaaactctgcatatgatgcagagtttttttattctgtaaaaggctgcggacgggtttttctatagccgtaccgataaagcagttcttccgcaatccgttttgaggccgatccgtcaccataagggtttgacgcctttgacatccgttcatactcggcctgatcggttaagagctgttttgtcagctgatacaccgtttcttcatctgtacccgccagcttcaatgtcccggctttcactccttcggggcgctcggttgtgtcccgaagcaccaagaccggctttccgagagaaggcgcttcctcctgaaccccgcctgagtcggtcaaaatgaaatttgctttcgcagcgaagttatggaaatccacgacctccagaggttctattaaatgcaccctgtccgaatcagcaaaatgggcttctgcggcctcacgaactgcgggattcaaatgaacgggataaacgacttgtacgtcctcaaactcttcaacgattcttctgacggccttaaacatctgttccatcggcctgcctaaattttcacgtctgtgcgctgtcaaaagaatcatcctgcttccttccagcttgtcaaaaatcggatgagaatagtcttcccgcactgtcgtttgaagcgcgtctatcgccgtatttcccgtgataaatatagaatccggctttttattttcagcaagcagattctgttctgcctggcttgtcggcgcaaaattcacatcagcgatcacgcccgtcatctgccggttgatttcttcagggaaaggagagtatttattttgcgtacgcagaccggcttccacatggccgacggcgatttgatgataaaaggcggcaaggcttccggcgaacgttgtcgtcgtatctccgtggaccaaaacgatatctggttttacttcttgaaacagcttgtccagtttcagcaaagcatgagatgtaatttctgaaagcgtttgacgctctttcataatattcaaatcaaaatcaggcgtgatgctgaatgcttcaagcacttgatccagcatctgtctgtgctgtgcggttacagtcaccagcgaatcaatttcctgatatttttcaagctctaatacgagcggagccattttaattgcttcaggtcttgtaccgaatacggtcattacttttagttttttcaacggtttgtctgcacctcgttttatatgtcggatatcccttcatgttaacatatttatgccgtttcttaatattgtaaagcttaatggcaaacaaagcaaaaaccgttacaagactctttgaaagcggattaaaaggtgtgaattttaatcaattgtggtaaagtggaaaaagactaggttatagttctgaaaaaaagattttgcagaaacaaggatggtgttattcagtgaagaaagtacgcaaagccattattccggcagcaggtttaggcactcgttttttgccggccacaaaagcaatgcctaaagaaatgcttccaatcgttgataagccgacaattcagtatattatcgaagaagctgtcgaatccggcatcgaagatattattatcgtaaccggaaaaggaaaaagagcaatagaagaccatttcgacaatgcccctgaactggaacgcaatttagaagaaaaagggaaaatcgaactgcttcaaaaagtgaaaaaatcgtcaaatattgcggatatccactatattcgccaaaaagagccaaaaggactcggtcatgccgtttggtgcgcacgcaacttcatcggcgatgaacctttcgccgttcttctcggcgatgatattgtccaggctgaaaaaccgggacttcgtcagctgatggatgaatacgaaaaaacattgtcttccatcatcggtgttcagcaagttcctgaaagcgacacacaccgctacggaattatcgatccgttaacaaatgaaggccgccgttaccaggtcaaaaattttgtagagaagcctgaaccgggcacagctccttccaacttggctattttaggaagatacgttttcactcctgaaattttcatgtaccttgaacagcaggaagtcggtgcagggggagaaattcaattaacggacgccatccaaaagctcaatgacattcagcgtgtcttcgcttatgatttcgaaggaaaacgttacgatgtcggtgaaaaactaggatttatcgagacgacgcttgaatttgccttacaggatcaggatatccgccataaattaattccgttcatgaaggatcttcttgaaaaagaagaagctgacgaatagaaaaagctgccgaatccggcagctttttttatgtgatctttactttttagacgttaccgtcagtgtcttatcagcattgttcacagaaaaagtatattcctggtttttaagcatgagcaaattctgattgattttgctgccgcctttttcacttaaagctgagatgtctgcaggacgcgataaatgaaaaaccacttcggagactgtatcattgtcaatcactacatccgtttttgcatcggatgcttttaatacgttccgtccgtcagccgtttgtcccgcagctggatttttcaatttacgctgcacatcgtcccggcttttattgagatatgagagaaactcttctgctgtttggcttgataaactgccgctgaaatcattcagctgaacatccgtcttttttaaagcgttcactttatatagatcagtctttttcataaagtactctttatcgtttaatttcactttagccgcctggttattctcggcttctatctgcaccttcgtaccgaaacttacacttgcggaggcttttccttttatatctttttcagtgtaaaggtccgccttttcagcttttaccaaagcaggtttattcacagactcataaaggccggcatcgctctgtttgacgtcaccgaaagatgtgatcgcacgcagaggcttgtctgaaaacatcgaagcgcctgcgccgacagccagcaatgcaagcagcgtaatctgtatcgtattggcaatgaatttaggcttcgctttcttttgctgggcctgagtgattttctgttcctcggctgcccgcgttctgccttcaatctgctcgttttgatatttctttttttctttctttgaaagcttgttgaaccaatccacaaaagctttatattcttttacaacggctttcgtttcgtcgaacatacgcatttcgccgtaatgcatccaagccacccggtcacacattttctcaatctgtccgatggaatgactgacgaaaaagatcgttttgccgcgttctttaaattccgtaatgcggtccacacatttctgatagaaagtctggtcccctactgagagcgcctcatcaataataaggatgtcagggtccatatgcgccgatatggcaaaaccgagacgggatttcataccgcttgaatagcttttaacaggctgatctataaagtcgccgatatccgcgaattcaacgattttttcataaagctcgtctatctgccgattgttgagacccatcatcaagcactttaaacggatgttgtccttgccgcttaattgattgtttaatccggcagaaatcgcgattaaagacggctgcccgttcatatcaatctcaccgcttgtcggcggaatgatctttgcaagcagattggacatcgttgattttcccgagccgttgatacctacgaatccgatcgtttccccttcatagacgtcaaaagaaacatttcggacagcgaaaaaacctttttgatttctgtttgggaaaaacaatcctttaattttgtcagactgttttttatatagaaaatactgttttgaaacatttctgaacgaaacttttagtttcatcgtataatctccttactatattaaagaaagtcaacaaacttatctctgaatttcatatgaagaagtgaaccgactgttaacagcagcagtgtgacgaaccagaaatacagcgtgtatttcacatcgtggaaaaaccactgcccttccataaagctgtctctgaagccctcgataatatagaaaagagggtttaacttcaagatggtcaaaacttcaggtctgtttccaaatttctccgcaatgtcccagaaaatcggcagaagaaaaaagagaagccttgtgacggcttgaagcaaaaactgatagtccctgattaatacgctgatggttgaattaaacaggccgaaagcaaacataaaactgatcatgcaaaacaagtaataaatatattgcagccagtgaagcgtcggaaacagtccgttgctcagcagcacaataatataaatcgccatcatcacaaagtaactgaataaattcgatgctatcactacagaaggcagtgaactgatcggaaagttcattttcgacactaaatttatccgtttaaaaacgctgttagatgcatccagtatcgtcggactgataaagaaccaaggaattaagccggccagcatccagacgatgaacggtacgctgtctccatttccaagcaccatatcatgtccgccgcgaatcccgaggccaaatacgaaccagtaagccagcatttgaatcatagggttgagaaactgccacaatatacccaaatagttcacttgatactttgatttcgtttcgtacactgcaagccgcataatcagcggaaatgagttgaattgctctttcagaatttttaccaatgcattcattctaatcttccttagtcgtaagttttaggtaatagctttgacttacaaaagcaccgctcataattgtaacagattacgatgtatttttcacttcataacaagcctgagtcccatgagcgcaacatgccgtcacttaagcaaaaaagcataattaacatggttaaattatgcttttttgcacttatttacttgtccccgaaaatcacttttacggctttttcagacgattctccggtttctaaataacagaacttctcgtaaaaaggcccgaacgaatccggaagcttataatcatctgattccgtttcattgacccatttgataacgtcacctgtttctttgacaagcgggccgggcgcttctttttcaaagtcaaagtaaaaccctctgagtttatcccggtacgtttcgatatcaggcacataaaacagcatcggtcttttcagattcgcatagtcaaaaaagacagaggaatagtccgttatgagtaaatcagagaccatatacagctcacggatatcttcgtagctggagaaatcatacgcaaatccttcatacggtccgagatcaaagttttccgccacgagataatgcatccgtaaaataatgacataacggtcgccgatcgcttctctcaattggtgaaggtctaaatcaaggtcaaacttgtattttcccttcttataaaattggtcatcccgccatgtcggtgcgtagataatcacttttttatcttgcggaagattcattttttctttcagcgctttaatgacagaagggctgttatccgtctgaaggaagtcattccgcggatatcccgattcaatcatggttttattaaactgaaacgcccgggcgaatatttcggttgaatatgcgttcggtgaaatcaggtaatcccactttgaagcctctgtcgtaaagttgcgcttgtatttttcagtgtttgttccgggcatatgcacttcatccatatctacggcaaggcgctttaaaggcgtgccgtgccatgtctggacatatgtcgtatgctcaggtttcggaatccacagcggcatacggctgttgacaacccagtactcggctcttgccatggcaaacagccatttgaacgtgaagcgttcgatataaggaatccctttatctttaaatgtctgtgagtaagcggggtttacactccagcagagacggtattccggcatctctttgctcatgtattcataaatcgcccgcgggttgcagctgtactgttttccggcaaagctttcaaacatgacaagtttctgtttgacaggcagttttcctgcaaatctgaatcctgctttgtaagtgttctgtattcttttctcaatgaactttttcagcttattctttctcttgcgtacaaaggaagcgccccgtttcagcttacctttcacaaaatactccacgcgggtgctgaagctgtaatcgttcattctcaggtggagatttttcgttttctttttcgtgaaaacgtgaaatctggcaggccctttttccgttttcagaaccgtgaattggttagggtttacatgttcagatttcagaacctttaacggtttgctgttggtgataacctcttcacctgtcccggcatcttcaaaaatgaattgaatatggaattgaaagatgagctgctgattcaattctttataaacagcattcaaatcaatttttgtatcaaagcctatcgtgtcaagcatcgttgtgtcctgaacatattcatcaaggtcgtgtctcggcacgtcgtgaagcggatacttcagaatgagaggctcctcttcttttccttttttcattttcagaatcaggtttttttcttttatctttaaggtttctgccgcattcagccggaatgcaaaacctttcagatgtaagctgccgtcagattcgagctccatttcatcaatccgcgtgacgaactttttctgcagcagctttaaggagaaattccctttcttcgtcgtgtaagggaaaaagtacatatgatgagcctcatctttataagaagacagttcaataggttcaaggctggattttaaccgttttttactgatatcactgtcatcattgataaaggagacatagaaatccagacatcctttgccgtccgtatggtcagaaagcagatccgtgctcatgacagcatggtactctccgccctctccggccaaccgtttcagagggacggaaagttccgcttttgttttacgatttataatctgaagagaaggctcttcccctgcagtgacattttcacaggatatcgtaatgctgaatgtctcttcctttatgttaagatgttttaacttgtatctgacaggattttctatacccataaaataagtctactcctctgtttcaattaaacatatccaatcacaatcatcattttgttactttcagtgaaaggttctccttcaccgtccggtagaattgatattgcagtccgttcgcttctgccgtcaccttttcaccgtcttctctgtttaacatgacacgttcataatcgttataaatgacatacataatataaccgccaagtccgactttttcaatgtcacttaacgggatttcaaggacgtaccgcccgtctcccagtgactgaaccggaaactggtggtgtactttcatgttatctctgtgctgaaactgaatatattgggcattatttctgtcctgtccgaacaagcggaacgtaacggtgaatttatgatcggcgaacaccgcgctttccgtttctccgtgcatgcgaagttcgaccagtttattttcttcatccgtcagcgggctttctaaataagccagtccgtctttcgtcacgatgtttttatcgggctcttttttggaccagcggaacagcttttcgacctcatcataccgtttttgagtcagcagacggtaggctgttttatgaatcggatgaaaaaatgtctcggaaatatcgtatttcgtcttctttaacacattcagaatttcattgaatttattgtagtaggcttctttgttttcgcttttcaggaagtgcatccgatcgaaaagccgcgtaatggaatcgaattcaatcaggcggttcatcgccatcttctctttttcagtatctaattttttgttcagaatatacttcattacggctatgttcgtgtcggttttttccattatattggtctgctttgtcagcgactcattattgtccattctgttcagataatagaccggttcggttgacgttgaaatatctccgcacgccaaaagaacatccataaaaaattgcttatcttcagcaaatttcatttccggatatctgatatcgttatcttttagaaattgtaagttcatcattcttgcccgcgggcccagatgatagaaaatatgccggattgaaaaaggcgataccttcgctctgttcagcgaagactcatgtttcccgatcgttttttgaccgttcacctgcatttcgatcgtttttccgaccgcataatttacatgatctctttcaagcatgtcgaataagattttaaccccgttcggcgcaaaccaatcatccgcatccaaaaatgtaatgtacttcgcatttgccagctcaattcccaagtttctcggataagccggagttcccgtgttgtctttcaaaaagacaactgtaatattttcatacaattcggcgtactcagtcaggatgtttctggaatcatcggtagagcaatcatctaccagaattaaagaaatatgctgaaagccgatgttttgaaggatcacagaatcaactgttttccttacatattcttctgcattataaacaggaacgactaccgctaccttcttctcttccgccaatgcttctttgtttaaaatggtatattcgcgttcttctatggacggcttggactcttttttattcaacttaaaaaagttactaagattcatctttaaattctcctcttattgtctagctttttttcaaaagcgcataacaaatatagcgaaaataaccttatattacaagaagtactccctatccggagggagtacttctttatcatctgtatatccgaatgtttcaattacaccccggcaatttcttttttaatctgtgtggtggaaatgccttcggttctagggagatagatgacttcgcattgatctttaaggaaatcgaatttgccttcccaatcgtctcccattacgaacacgtcgatgttgtgatccgctacgtcacgtactttttgatcccagctgttttccggaatgacttcgtcgacataacggatcgtttccagaatcagctttctgtgttcatagctgtggtaggcctttttttgtttttgcaggttgaactcgtctgttgagatggcaacaactaggtaatctccaagctgctttgcgcgctcaagcagtttaatatgaccccaatgcagtaaatcaaacgttccgtaagtaatgaccttcttcatgaaacaaaagctcctttctatcatcatacgtataacaagcaactgccctgaaatgctgcgcagctgtatccttaatcactaaagtgccaatttcgtactcatggaacctcattatatcacatagccctgaaaaggttaagctaatgtaaaacgaagttaaattccacttattaacaaatgttattgcaataggagtttagcagggtttttgcgcggttgattaaagaaattgttatcttatttatatttttgtaaaactattgttaagtttatctgaaggtattatgttaaaataaagcttagcttaagtcacgaaaaaatgaaagaaaatcccgtacaaaaaggaggacggcagatgcagactgaaatggtgcacaacctttcttatgttaatggaaatttacaggagtttatttcatatttagacacttattatatcgcacaaaagcaaggagccgtcattgcgacggtcaaccctgagatcggatacgctgcggcgaaagacaaaggttatcatcaagtcatttcttccgcggatttcgtcctgccggatggtatcggcgtcgtgttaatgtcacgtttgacgcagcacccgctgaaatcaagaattgcgggattcgatgtatttctgtcgctgctcggtctcgcaaaccggcagtctaaaaaaatatttttatacggagctaagcaagacgtgcttgacgccgttttgaaccggatcggcaaagagtatccgaatattgaggttgtcggagccagcaacggttatgaagcggataaacgcttcgtcgccaaacagatttcccgggcgaaacccgatctcgtgtttgtcgccttaggatatccccatcaggaacaatttatttatgaatacaaacatcttttccctcaggctgtatcgatcggtttgggcggaagctttgatgtgttcagcggaacggtgaaacgcgcccctgaatggatgatcaaaacgaatctggaatggctgtacagactggtgacgaatccgtggagatggaaaaggatgctgaacattccgaagtatgcttttaccgttttgagaaataataaatcaaataaaagcctgtattccgagcaggcagaagatcaaacgaaacagctttaaacaaataaaacagcaaaagagattggtaatctatgaacttgcgatctttattcgccgctttttattctatatatctgtctgttctgggcgttttgttcaagcctgtaaagcccaagaaccatctgaccctgctggtatcttttgaagagaatgcacaggctctcatccgttcttacaaagcgcacgctgaatcgctttcttatgaagtgacggttttgtatacgagacacgccgtcagtctgaaaaaagagctggaaggactcggctctttttatctgaacgaaaaacatccgctgcatcttttgaaggcggttttgatcctttttaagagcaaagcggtgataacggataactatttcctcatgacaagcgtcttaaaccgccggccgcaaacgacatgtattcaagtgtggcatgcgaacggctctttgaaaaagttcggccttgaggatgtgacgaatcaaaaccgtccggcatcagacatcagccgttttaaaaaagtgtaccgctcgtttgactttgtcaccgtcggttcagacgcgatggctgacgtttttaaaaagtcgttcggcatacgggacggccagctgttaaaaacgggtgtccccctgactgacgtctattatgaagaacacaagcccgaaccgaagcacaaatggccgaaaaaaatcatcctgtacgcaccgacattcagggattatgatatgcagtcctttcggctgccattcaccgaagaacagctcacaaacgcgttaaacggagagtatatgctgcttgtaaagcttcatcctgccgttttgcatcatatttcggcttcgtttgaaagcgaattgatcaagaacgtgtctgacatgcgtcttcatgatctcttgaaagcggctgatattttaattacggattactcttccgtgccttttgaattcgcgctcttaaataaaccgattttctttttcacgtatgatctggaggaatatgatcgaaaacgcggtttaatcgacaattatacttccgtcattcccggaaaggcttgtcatgacagtgaagctcttttggaggaaatgacgaaaaagccatttgatgcagaagaaatgaagcggttctcggacaaatggaatatgtattcagatgggaattcgagtgaagcgttattgaaatttgcggaaacaaaaatgaaaaattgtgctgaagcacctgcctgaatctgaggcgggtgttttttgcatgaagaaagggctgaagcatacacttcagccctttttttatactttcatatacacgggaacatcatagtaaagcgtatagtcatccagcagtgagtataagctgtacatgcggtttacctgcttatacgcccagccgatgtctgtcgcatactgatgagccgcggctggagaccatctcattttatacagcgtatcctgctcgtatgaaggattgtgaatataagacgcaccgataaattgggctccgccgataatcgcggcttccggagtaaaccagccttgcttatacgcgtattgtgcgccgtagtaattcgggttgctgtcataagccccgatgccgtacatgttgtaaacctttttaccattatacataatgccgttcgcaagctctgacgtgccattgcccgtttcaagcaaagcatgcgaaatcaaatacacttcattaatgctgtatttgccggcggctgtaataaaggcctggcctttccctgtcagtattcctttattgaccagcactttttgattcagttccgatgcgttcagtccggctgtctgagagagcttcagaaattgaaagtaatacttgctgtcttgtgcgaagtgagccggattgacgtactgcccgacttcgtcactgctggcgtttctccagcccatgctgagtttggcccagccgtttgtctggcctgtgatgctgactttatcgccttttttcaactgcccgataatattgcctgagctgacttccggggttgaccggacgttcaggacgtcggctgtgaccgttccggaggccgtattgatgtacgtaagcgatgcataagccgcggcatcagtctgcgggctgactgtcatttgttttttgaccatatctgccagcgagatgttgtaattggtgttcatgatttgcggtccgttttttattttcagaatagccatcgtccatccgtacagctttttcagcttttgggaggcggcgtccgctgactgcgctcccgtgaattgattgcgaatgcggagttcataaaccggatggctttcactcgtatagccggcctgtaattgtttggcgctgaaaaagctcatgcttttatttaaaacggttttactgctgaatttttcggttttgatgacgtattgtgcagagccggttttccccgtctccttcacagtgccggccgctttgttttgcttgaaaaaagcagtcacgcggtcaatgtcttccttcttaagcagcggtgccgtttcaattctgaattgtgtatacgccgcttcacctgttttctgtgcggaggcggatacttttttccctttgaaaaaatccagcgattgattgatctttgccgtatcaagcagtgattcggttgtgacttggtacgttgtgtccgtctgcttggatatcgtttttgaaatggcagtcagtttatatcccgccagcagattcaatcctttttttatcttcgactggtctgccgtctgctgagaaagcagctgatattcgttttctgctgtttttcccgccgctgttcttgccgtctttacatgctgctggcggaaaaacgcctccgtttgatccgcctttgcagcggtaagctgccctgccgtgatccggtaaacggacactgatgctgtctttttgacaggcgatgcgtcgcaatgccattttttctttttaaagaaagcttgcacgctttgcagctgtttagccgtcagtccgctcatcgcgaccgtgtaattattcttcttgccggctttttgatagcttccgctgacacccgtattcttcttgatttgggtgatagcattttgtacggcgcttactccgttaaaatatcctgactgcacgttatacacggttgctgttttgctttgggcatacttttgaacgttccctttgacgcctgttttctgctgcagctgtttcgctaaacctgccgcattatttgcatttaaaatgtcagaggctgtcacggtgatattcggactggcctttgccgtgactttcagcgacgactgcaatcctgtttccttttgaaaatcagtttgaatttgagcggctttttgatcgccggagattgttcccgattggatctgaaaccgggctgtttcccgtttgatctgacggtatgacgctttcacgcccgtctgcttcgtcaacgcttgcgagagcgcttttgcatccgcatcggccgccatctcagaagtcacgacctgcttatacggctgttttgtccccgccggcttgacggcgccggtcacgcccgtttttttcgtcagttcggcaagaagatttttcgtctgccgctcgtctgatagaacgcctgatgtgacggtcacgtacggctgtttgcttccgcttgcgctgtaagtgccggccacgcccgtctgcttcgtaaaatctttcagcacggttttcgcatccgtttcatcgtgtaagcctgaagctgagatttgataagtgagcggcgcatttccggctttctttgcgtcagcctgccaccccgtatcctttttcaatttcgctgccgcttgaagcgcctcgttctcagaagcaaattgctgcttcgtttccagctcgtaaacggagtagtcgctgtatgcggcctcggcgtgctgtgtaacggtgctaaagacaaggaaaacggcggacaataacataggtgcaacgaatctctttttcattccttctcctctttctgattcaattggtttctatcaaactagtttatttatcggcccgctttcttcatttttacagagagaaatcatccaattatccaaataaaaaaaacttaatcccagagctgggattaagtttggttttatatatgagaaacgatgatcgtgcaatctccgtttatcgtaaagtcaggcatctgatccggcagtatgaaatgcgcgcctttttcaagcttggcggacttgccttcaaagatgatggagccgcttccttctgtgacgctgcataacataaacggagcgtcctgggtcatttccgccgtcccgctgatatcccatttgtatacagaaaaatattctccctgcacaaaggttttaatggtgatgccttttctcgtttcagttgattcatccaaaaatccgtccacatgaggaacggtggcggcgttgacggcatcgcggatatgcagctcacgcgcaccgccgttttgatctgtacgcccgtaatcatatatccggtaggcggcgtctgaattctgctgtatttccagcacgagcgctccggcgcaaatggcatggatggttccgctcggcacataataaaaatcgccgggtttgatcttcacgcggcgcagcaggccttcccagtcaccgctgttaatcatggtgacaagttccgctttcgaacgggccgtatgaccatatatgatttccgcattttctttacagtcaataatgtaccagcactcagatttccccgtttcgccctgtccatgctcctcggcgtcataatcgtcaggatggactttaacggacagatgatgtttggcgtccagtattttagtcagcagcggaaaccggtccccttccgttccgccgaataactctctatgctgatcccacaggtccatcaaggttttcccttgatacggaccgcttttgaccgtgctcattccgtgcggatgggctgatatcgcccagcattcgccggttgtttctgaaggtatgtcatatccgaatcgttcgcgtaataacgtgccgccccatattttttctttacatacaggctgtagaaaaatcggctcttgcgtcatgttcgttcccctccccttaaaaagcggctcatatcccattccccctgtgtcttttttaaaacacggagggagccgcggttaaaaacaatatgtataaaatggctgacctgctcattataccattcggatggggcggaatgctcagtcatttcctattccagaataaaatgccttgtttgtcgcaaattaaaataactgatggaaaggggggaacattatgacgatacatgcggagctcggcaaaaaccttgaagcgctgaaaaaacggatcggccaaagcgatgacatgatgttttattcgtttacgtacggaaacggcaaatgtgacgcctgccttatatatatagacggactgaccgacaatcaattgcttgcggaatatattatttcgcccgtgcaggcggccgccctgcatcaagaggaaccggctgaaataccgccgtcatccatctctttcggctatcgtcacacccggctttcttcacttaaggacgcggaggcagacattttttccggcaaatcggttttgctggcggagggatgggaggaagccctttcgtttgaaacggaaacatttaaaatgcgtgatattgaagaaccggcttcagaagtgcttgaacggggacctaggataggttttgtcgaaaagctccgaacgaatacggcgcttttgcgcgagcagtccggtgatcccaacctccagatcaaagagatcacactcggcgaacggacaaaaaagcggatcgccgttgcctacattcgggatattgcgcctgatgatgttgtaaaagaagtgatgaaaagactggattcgatcaccattgatgacattccggaatcaggaacgatcgagcagcttattgaagataacacgtattccattttcccgaccgtcttgacgaccgaacggcccgaccgggttatgggcgctcttttggaaggaagggtctccattcttgtagacggaacgccttttacccttttggtgccggctaccattgatgaatttatccactcacctgacgattataatcagcggtgggttccggttaactttctcaggctgcttcggtatacatgcattttaatcacgatttatttacccggcctttacatatcgctcgttacgtttcacacggggcttttgccgacgagaatggcggtgacgattgccggaagcagattgaatgttccgtttcccccttttgttgaagcgtttattatgatttttacgattgagatgatcagagaagccggactcaggctgccgaagccgatcggacagacgatcggcctgatcgggggcgtggtgatcgggcaggccgccgttcaggcgaacatcgtcagcgcgatgatggtcattatcgtatccgttacggcattggcttcttttacggcgccctcctatgcgttcaattttccgctgagactcatccgtattttttcgatgattttgtcggcgatattaggtttatacggactgatcatgtgttatctgcttgtcgtcggccatctgatgcgcctgaaaagcttcggccaggactatcttattccgatcatggcgcagccgggacaggacttaaaagatacgatcgtcagactgccgacgcctcttttgaaaaaacggccgaccagaaaagagacgaaagataaaatcaagcaaaggtgatcaccatgaaaaaaccggaagacaagctgtcgtttatgcagacacttctcatggtaagcggaacaatgatcggagcgggcgtgttaacactgccgcgctccgccgcagcagcggacagtccgagcggatggatcattattcttgtgcagagtctcgtgtttatcggcatcgtcctgctctttatgccatttttgcagaaaaacagcggggaaaccatttatgagctgaatcaaagcattatgggacgcgccatcggttctcttcttaatttattcatcagctgttattttgtcgtcaccgtctgttttcaagcccgttttctcggtgaggtcatcaattactttttactgaaaaatacgccgatgggtgtcgtcatattcatctttctggcggtcggcatctaccatgtgaccggcggggtgtatcccatttcaaaactctatgcttatctctttccgattgcgatcgtcattctgattacgctgctcatattcagcctgagactgtttaaactggatttcatccgcccggtcatggaaggaggctacaaaagcttttttgagctgtttccgcgtacccttctgtatttttcaggacttgaggtgattctttatctggtgccgtttatgaaaaatccgaagcaggcgaaaaaggctgccgtcttcggcatcgcatgcgcaggcttattttacagctttacgctgcttgtcgtaatcggctgtatgtcgatcgctgaagccaaaacggtgacatatccgaccatttccctgattcacgccttggaaatccgcggtattttcatcgaaaggtttgatatctttcttttaattacgtggacatgccagcagttcacctgtatgctcggttcttttaaaggagcgcatctcgggttaaacaccattttcagactgaaaaataaaaacaatgcctggctgctggggggcttattggcagtgacattcggcctttcaatgtaccctgatgatatcaacagtgtgtttgcattcgcgaatattctcggatatgcgttttttgccgtcattatgattccttttctcatctggtttgtcagctggatgaaaaaaatagccgggaggaaacagacgtcatgacacatttcgtaaaatgggcggcggcgcttttcatactgatgacgctttcagggtgctgggatgcgaaggaagtcgaaaagctatctttcgcccgggggctggcgatagacgagacgagtgaccgccgatataaattaacctatcaaaacctgctgccccaaagtgaaaacagccaggcttccggccggcccgtgtttgtcaatgtgacgtcgcggggggataccattcttgaagccgtcagtgaagtcgctttaaaagatccgcccgtttacagcgatcatttaaaagtgctgatattcagcgacaaattgctggccgaccaaaatatactgcagatgatgaaccattttatccgtgatgatgaattaaggcggagcagctatctcttcgcggcaagaggcaaagcggccgatattctgacagagccgacgccgaatcagcagcagcccatgcccgcggaaaagctgatcgaccttacgaacaacggcggctacaacgggaagattttaaaaccgctccgaatcgggagagcttcgatttactgccataataaactcagttttctcattcaggccgtcagcaatcaaaaaggaaaaacggtgtatgacggagcggccattatcaaaaacggaaaacaaaacagattggcaggctttctgtcatcatacgaagtacaaagcctgaattggctgacggggacgatacagggcggcgtgctgcccgctttggataaaggagggcacccaattaccttcgagatcaaaaaatcaacatcctccatcacccccctgctgaaaaacgggaagctgtcgtttcacgtagcggtgaaaacaaaaggacttttgtcagaggatcaatatgccggagaagattcattcgatcagcactatttaaacgggctggaaaaggttttcgaaaaaaaactgaaaagcgatatgaaagaagtcatcgataagctgcagaatcaatatgaaacggaccctgtcttcttttctgacagagtccgcattcaatatcccgactattggaagaaagtgaagcatcactgggatgaaaccttctccgaagcggcctttgactatgatgtttccattcagattaccaacttcggaacgatggggcggtagccttcagcgtgttttttcgacacgaaggagaatctgataaatccggctttgttcgggcagctgtgtcaccggaaattgcatcgattgcgccattcgtgtgatttcctgtaaaaacagctgcacccgctcatccacgtgaacatacgtataggactgctttttcacgtcaaatgtctcttccggaaagagcgtgcgcaccgtctgcggcgtaaaaaaccgcaagtgggtgcggtcgagaatcccggcgtctctgtatgtccagtccccgagcagaagcgggaacagcgcttcggcgtgggaaatattcggaatgctgcaaacgattgatccggcaggcgacaaataggatgagtacgtttcaatgacgcgccacgggtcttttaagtgctcaaggatgtccgcgaaaatgatgcaatcaaaaaagccttccggataaggcagcttcactttttcgacatcttcctgcagcaccgcttcataatgtccttttgccgcttgcgccgccagcgggtgcagttctattccgtacagttcgcaaggctgtctgttttgaagttccagccccgtagctcccgcaccgcagccgacatcaagtatccgtttcgcctcccggggaacgagctccgcaatttccggtctcggatgagtaaagtacgtaaaatcagtgccccatttttccgtaaaacgctggcggttctccgaatataactgattgatattgatatcctgattagccgtaaacgtcgcatgcccgtggtgatgcacaaaggcatcgagagcgatgtgcaggctgtatcctttttgcagggcgcgcagacataggtcatcatcttcaaaagaaccgtatccgaattgctcatcaaacgggccgatgtcttcaatgacgctttttttcaccagaagacagaagccgacaaggcgcagcacccgctttgtttgatgcttttcccgtgcacaatacgcctccgcgaatgactccagctcatcaagcgattgatacgcgtcatggatcatttgcgcgccgctgacatagttgctgacgggcccgaccataccggttttttcagattgatacagcaccctcagcatggaggtgagccaatttttcgtgaccatcgtatcgttgttcagaaacagcagattttctccccctgccgcttcgattccctggttgcaccccttggcgaacccgaggtttttttcattaaggatgactttgacgtcaggcagatttgatatgtattctctcgttccgtctgaggaaccgttgtcaactataatcagttcaatcttatctttgtcggtgtatcgttcaatgctggccagacattttttcgtcagctcaagttcattatatgtaaggataataatactcgttttcaccggcatccccgcctttatcgtgactttatacaacgtatgacatatccccgtcatttatgtgaccgtgcgggcgcccgcacgcatccgttttgaggggccggtgaataaccgcccccctaaaactgaatattacggatgaactgtccgccgatttgattctgatcccgagcctccgttacggcttttcagatcctgctcaatttcttcaaggcttttccccttcgtctcggtcactttaaaccggacgaacaggaatgccattattccgatagcggcataaatgagaaataaatagctgatgccgactgcttccattagcatcggataggttaatgagacaatcaatgttccggcatgcagcatcaaagtggagacacccgtcccgataccccggacatgcagcgggaataattcaggaagcatgacccacacggcaggcccccagctgaccgcaaacacaatgataaacaggcctaaacaaatcaccgttgtccatgatgcggctgctgaatgttcaaagaaaagattgaccgcggccaatacgagcagactgatgaccattcccgcatttccggccagcagcagcggcttccggccgatcttatcaatgactttaatagccgcaagcgtcatgatgacattgacggcgccgattccgaccgttcccaatatagacgcggaattgccgaacccgacactggtaaatgttttcggtgcgtaataaataattgtatttgtcccgatgaattgctgcaaaaaggcaagtccgaggccggcaatcagcgcgggtctcacccacggctcaaacaattctttcaagccgccttcgttttccttttccgcttctttcatctgatcaatctcatcatcaatattcttcgttccccgcaatgatgaaaggatttctcttgctttctcttctttgccgatcgtaaacagccagcgcgggctttccggcataaataagattccgatcagcagaatgactgacggcacaaccgcaagtccaagcatccagcgccaagcgcctgcatcggcaaatatatagttcacgatataagaaacgaggattccgaccgtaatcatcagctgattcagcgaagaaagcgccccccgtttatgcttcggagccagctccgataaatagagcgggacgatcgttgtcgatgttccgacagccagtccgagaataatccggaaaagaaccatcacctctgtattcggggcaaaagcgactcctaatccgcctatacaaaacagcagcgccgctcccatgatggccttccgcctgccgaaccggtcggtcagtttgccggcgaatcccgatccgagaatcgcccccgccaataacgaactgacgacgaggccttctgtaaaggcgttcagtcccagttcttttttcataaataaaatagctccggaaatgactccggtatcatatccgtataacgcgcccccgagagcgccgaaaaaatagagccatttattcgagtgtatgcttttcatgttatatagactcccttcatccaacgctgtatccgcgcggaattgttctactgcttcttttgcctgtttccgatcgtttcaaaccttccgcaccgttaatatccattattttactgattatttttcacaaagcgacgaaacatttcccgcttcctgccgtccaatataatgtgaacctgatgcaaaaataacagtagatgttgtcgaaatagagagaaagatttagaattttctcatttgcagagttgctccgagtcaacaattatggtacgcttcacaaagaatagaaacgagaggtaatgatatggaagaacgatctcaacgcagaaaaaagaaaagacgcctcagaaaatgggtgaaatttgtactggtattcgccgctttcttattggtgatcgccggttccgtcggcacctacgcatttgtgaaattgaataatgcgaccaaagaagcgcacgtcagccttgaccgcggcgaccagtccgtaaaacggatcaaagaatttgacccgaagaaggattctttcaccgtattgcttttaggaatagacgcccgtgacaataagggtgaatcagtagatgacgcaagaagtgacgccaacgtgctcgtcaccttcaaccggaaaaagaaaacagcgacgatgctcagcattccgcgggattcctatgtcaacatcccgggacacggctatgacaaattcgcgcacgcacatgcttacggcggttataatttaacttataaaacagtagaaaacatgtttgatattccggtagattatgtggttgaaagcaacttcgacgcgttccgcgatgtcgtcaatgagttgaacggcgttacggtaaatgtgaaaagccagaaaattgccgatcgtattaaagtcgatacaaaaggaaaagtcgtgctgaagccgggcgtccagacgcttgacggtgagcaggcactggcttatgtaagaacacgcaaagcggacaccgatctgatgcgcggacaaagacagatggaagtgctgagcgccattattaaaaaatctaaatcgttaagctcgatcccatcttatgacgatatcgtcgacagcttagggaaaaacttaaaaatgaacttatctcttaatgacgccatcggtctgttcccgtttatcacatcgctgaaatcggtgaattctttgcagctgacaggttcagacagctacatttacactcctcagtacggcaaaaatatttattacttcaagctgaatgaggaaaaccttcaagaagtaaaaacgaaattaaaaaatgatttagacgcgtaagatgtcacggcgggattagcaaatcccgccgtttttctgttgaaaaaaaggacatgaaggtatagccttttaactgacggctttctgctgatttcgcacaaagctgaacatactacatgaagcagctttatttttaaggagggcatccatacatatgaaattgatagccattgacttagacggcacattactgaattcggacagtgtgatttctccggaaaacagagcggctttacaaagagcggatgaagcgggcattctcgtggccatctgcacgggcagagccacgtttgatgtaaaagcgctcttgaaggatttggatattccgatcattgcggcaaacggcgggacagtccatgacaaaggataccgcctcgtcagccggctcttaatggatcagcaggccgggaaggatatcgccgcttatttaacggacaaagacatttactttgaggtctatacagatgatcatctgctgtccccgtttgacggcgagtccaaactgcaggcagaactggacattctgaaaagcgccaatcctaaggaagatattcagacattatgggagggcgcaaagacgcagttcaaacaattcggcattaaacccgtacaggatatacaggcgatttttaacggagacgaacatgtttacaagcttctttgtttctcttttgatatggaaaaactgagaaacgccaaagaagaaattacacatcatcggaaattatcccagacatcttccggaaaacacattatcgaaatcctccctgccggttccggaaagggacgtgctctgacggagcttgcctcactgtacggaattgaaaaacaggatatttacgccatcggcgacagcccgaatgatttctccatgtttgaagcggcgggaaaccgcatcgctatgggcaatgcgattgatgaactgaaagaaaaaagcacctatattacaaaaagcaacgatgaaaacggcgtcgcatatttcatcaaccggcttctcgacaatgggcaataaaaggtaaaagtcaggtctttcacggcctggctttttcatgttttctaaaaaaggagtttcatgatgtcgaatgcaatcgctattataggatttttagcttttctctgcgcagtcggatacggaatttttcatctcatatgcaaagcggcaaaaaaagaaaaacatttttcaaaaaagctgttttggcctcttctcatcggcggatttatcctgcttctgaccggtgcatccctcgcagagccggacgcctcggccgtgaaggcagaggagaaatacagcacccttgatacggcttatcaaaaattgacgaaggaacaccaggcgcttgagaaaaaatatgaaagcatcagtgccgcagccgaaaaggagaaatccgaagctgaagccggcaatgaagaaaaactcagcaaactcagccaagagataagcgagctgaaaaaaacaaacaaatcactcaaacaagacaatgagaaattaaaaaattcacaaaagaagctcgaaaagaccgctgaaacgcttcagtcagaaaataaaactttaaagcggcagaaagcagaaacaaaaacatccgaaaacgcggaaacggcgcaaaacaacgccccttcctccggaggacatgccgaaacgaaagcagccggcacctcacagggatgcgacattaaaggcagccggtacggcatttatcacacgccgggaagtacgtactacgaccggacgacagatcccgcggaaatgttctgttctgtagaggatgcgatagcggccggatacagagcgccgaaacggtaaaagaaaaagacgtcagagacactctctgacgtctttttttacggaagccggatgccgcccgcatatttgtccttccaataagcgcttgtgttcatatttgttatggtaacacctgcggacacggtgacatgaatcacttgtccgttcccgatataaatggccggattcaggctttccgctttaaagaagaccagatcgccgggcttcagatcttgtttatcgaccggaacgcccgcctgcatctgcttgtcggcataacgcggcaggctgattcctttcgctttttgatagatgtattgaacaaatcccgccgtatcaaagccggtttccggtgaagcgccgcctttcagataagaaattccgatatgatcggccgctgtggacacaacgggattgtctttagaaatggctaaattgctgaatcggcgcacccctgtgaaatgttttttccaataatcttccgccaagtaagaaatggtgactttttcggagcggcttgcttggatgaaccttccctctcccgcataaatgcccgcatgggaaattccttttttatacgtatcgctgaaataaatcacgtccccgggctttatgtcgctcagtttgattttctcaccgaccagccactgctgttccgcagatctcggcaggtaaatgtgaagcttgttttcaaaaacatattggaccagccccgaacagtcgaatcccgcctcaggcgtgcttccgccgaatacatacggaatgtcgaggtaacgggctgcctcctgaacgatcggatcatcagccagttccggatcttttgtcatccgctttgcgccaagatataaattcatccaataactgcttttttgaaagcgtgtgacggttacgccttctgacggagaactgtgtatcatctctccgtttccgatatacagaccgtcatggacggccgcgttttgtgttgaatctgactttttgaaaaacacaagatctcccggtaaaaggtcattttctttgacggcggctccgactttccattgatcactgaccgttctcggcagatggatgttctgcctgctgaaaagataatgcatcaatccggacgggtcaaaaccgtcctcaggctcttcgcctccgtaaacatatttatttccgacaagtttttgcgcgtctgaaacgatcaggacagaaacttgagaatccgcttcggcaatttccgttctcgttactgcaggtgccacaagacaaatcataaggccggcaaggatgtacttcctccagcttgtgagcatgttttctattcactctcctcatttttagtagtttttacatcggtaacttttaacaaatgtttaggagagcacacaaaaaaagaatgcccgatatgggcattctttactggattcggaacaaacaatatgccggcaagcggaatcatgcgcttattttgcgcccgctgtgtcctcttgctgaattttttgcatttccgtgtcaattttttgtttttcctgatctgtgagctgatcattgtatttaaacgcagacataaacataaataccataatgatcgcggcaaacggccatcccgctttaatgattttcatttgtttttcactccgctttcttttttaagatatcgctgtgatccacatcaaacgttaattttccatccttgacgctccacttgaaattcgattctttcgtcagttcacgtacgatcgttttatgattgatgctgccttttttaaccggtgcaggcgttgcttcatgaatgttcatcggcgtgacttcaaagcgtcccgtgccgtttttctggagatgatattgaacaagcgccgtgtctctcgttcttgtccacccctggtcgaatacgaagttgcccaggctgtagaaaataacggtgccgtggtacatttcgatcggttccagcacgtgcggatggtgtcccacgataatatccgctccggcatcggacattgctcttgccaattggcgctgtctgtcattcggatcattatcgtattcctgtccccagtgtgtttgaacaatgacaagatcggctttctttttggctttagaaatcatcggaataaacagctctggatcggccggaagcacacccggcgcatttcgtttagctgcaaaaccttttccggaaacatcagtgaaacccagtgttgcgattttgattccgtttacatcttgataagaaatgttctgctcggcttccttcagcgtgaggcctgctccgacaagttcaagattttgctttgaaaactcttcaaccgtatcccgcattccttgagggccgtaatccatcgcatggttgttggctgccgtgagaactgtgaaattcatgtccttcaatacttttacggcatctttgtttgactgaaggtggatatttttttctgcttctttgtagttctttttatatgtaaccgggttttcaaagttccctgacacatagtcggatgattcgaagaatggctttgcataacggaagacactctccgtgcctttatgctttgtcactttctcgacattccggcccatcataatatctccgacaaatgaggctgatacaaggtcatcggcatttcttttcacactcggcgtttccgccttccctgtcaggatgcagacgaacatcaggcaaaagacgattggcagcgcgataaaaacgtgaagattggtcttctttttctgctgtttggtcagcttcagcagtttttcttgaaagcttaattgttttttcatcgtttgacacaccttacattagattaagtagtaagcaaacataatggcaaaagttgcgccgcttaagaacagcgtgctggcgaaagtaatcgttaatccctgtttctgaatggtattggcgatcagacccggtacgatgataccgattccgcggaattctgatatctcaaacggtacgatcgggtaaagaaaatcaagggcgatttttaagcagattcccgttatcagcatagctgcgaattttctgcgtccgtacaatatcataaatctggataaaccgtatttgacgatcacgtatgtaagaagactcaccagcagtacgagtaaaataaagaccggctggttaaaaacgagccctaaataacccggcacaactaaaccggcaggtacgatacctgttttttccgcgaaaattaaactgattaacacgcctaaaataagtgaaatgtataaatctgatccgaacatttatccttttcctcctagctaacgagctgtttcaccttatactcttggattttttcaattaatggttccgctgaaccgtggatattgccgacgccatatatgacacggttttgcattcttgttttcagcacgtccatgatttcgtctgttgatttatattccagatcgtgcagtgtatcggcaggaatcttgccttcttcataagctctgacgatcggttctgtcgtctcgccgatgagtatgagttccttcgttttaatgtacggaagcacgtcgtttgcgaactgaatcgttctgtccacacggtcggcgcggcagttcatgatgacgatcggttcatctgtcgggtagccgatttcctttacacgtttccatatatttaaagtagaagatgcatcatttgcggcaaagccgtttacgaaatgaccgggctccttcgtgctgagcagcggcaggattctcatggcgccaggatcaggcggcgcgttcagcattcctttaaacgccgtttcttcatctatcccaagagcctgggcaacgccgagcgccagggaagcgttatcaggaaagaccatatattcaaattttcgaaggtattcatctgtaattttagagttatccgcaataatgacctcggtattccgctctgcggctttttctttaaagaagtctgtgtattcactgtctgtaatgacaaggtgaccgttatacggtatcgtcgcggtaaaagcttcagcaatctcatcaagcgtcggccccatgacatccatatggtcttcaagcacattcacgatgacgccgatgttggcttgaaggagttcttcctgaaagataatctgataatccgggtttactgccatacattcactgacaatggcattggcgccccgttctacggtttccttcattacttctttttgctcgccgatattcgggccctgcggtttccgtttgatcggtttctcctcaggtgtatcccaatagatcatccttgcatctgttcccgtcgtttttccgactgttttgtagcccgcctccatcagtattccggtcgtcagcctcgttacggttgactttccgcggataccattaatattgacgcgtactggcagagcatcgatattcttctgatgccgccttttttcaatgattccgatgattagtacggcagcacaggctataatgagtaaccacattgatttttgacatctccttctgtattgataaattcattcatcagtatatagcttcactatgaattctcaatcggcattatgtaacataatcttcccgctttcactgagccaaacttctctattagtgacgctattcttcctattatcgaattgctttttttgggaataggcaggacttaaaccttacttcaattttttaaaagaaaaatgtatgcgtttacatttccgcacataaattcatttggaccaatgggactatacgcgttccggaagaaaaagatgtaatgataatccatcttttacagcctgttatatcagcgttttccgcactgcgcatacgtttcgggactctatgtccgctgtgtgcagactgcctgttttgttaaggataaggtcttaaagtcattcatttttcccccgtatcctgctttcagtcccattccaaaataactagcggaatgactggtacgtgacagaaaaagacgggtccggagtgtttacaagaaatacacattttatatgcggaaagcctatctccttttaaagcatttacaggacatttatcactcttttgaaataattttaataaatctttatattcgttcaagaaatattcatccataattgtgaagttcttggtaaaacgtcgagaaactcctctattttataaaatgcataaaaaaggaatacccgctgaaaactacaaataaccgggaaaggaggcggtctgatgtctgcggataaacaaaacaagcggatttccggcgattttgaatcggctgtacgggaaatgcaggagctgatgtgtgtttgcggtgattttaaaatacgaaggatcaaactgcaggaccgtcataccgctttcttttatattgaacaaatgatagaagaacagaagctgaatgagtttctgttaagcgacaccctgcagaacggtccgcttgaggaaacgatgaatgccgtcagcagtgcggaaacggatgaaaccagaaaactcattgacgggattttggcaggccaggttgtttttctcagcgatgcatcaaggaaagcgaagctgttttccgtcgggcagaatccgctgcgttccattatggaacccgaatctgaaagtatcgtccgcggcgcccatgacgggtttgtggaaagtttggaaacgaacattcatcagctgcggtttcacatacaggaccgccatctctccgttcattatatggatatcggggaaagagccaaatcaaaggttgcggttatctttgttgagaatatcgccaatccggagattgtggaggaagtgaagcggcgcctgtcatacctgcgtatagacagcgtgcttgcgcccggaattatcgaggagtcgatagaagataattcgttttccatttttccgcagatcgttcatacggaacggccggataaagcaaaagcatgcgtgatggaaggctgtgtgctgatcatgatggatggcagcccgtcggccttgattgcgccgatcacgttcttttccttttttcaatcgccggatgactacagcacgaggtggatttccgccagttttttgagagtgctgagatttttcgcctttatgatcgcgattacactgcccgctttttatatcgcgctgattgcgtttcattttgaagtcattcccaacgatttgattatcaccatgaaaaattcgattgttgatattcccttccctccgctgatagaggccatgattatggagattacgattgagctgatccgcgaagccggtatcaggctgccgaaaccgatcagtcagacgatcggcattgtcggcggtctcgtgatcggtgacgcagtcgttcaggcgggactcatttctaatatgatgattatcgtcgtggccgttacggccgtttcttcttttgtgcttccttcatatgaaatgagcacgtccattcgaacgctcagatttccgcttatgtttctggcatcctcgttcggttttatcggcatcgcattcggcttcggacttattctgatgaacctgtgcaagcttgaatccctcggcgttccgtatttatcatctctgacgccgtttcatttcagtgacttaaaggatgcatttatccggctgccggcctggtttattaaaagaaggcctttttatttgagaccgcaagattcaaagcagataaaacatgttcgggggtggagaaaagatgaagcctaaaaaaatcagccggcttcaaggcgtgtttttcattaatcagacgcagatcagcatcggcattttggcgctgccccatttactgatgatgaaatcgggaagcagcggatggatttccattctgcttaccggattgctcgtccagcttaccttcagcctgtatatgatattatttcaccggtttccgaagctgaacctgtatgaaatgctggaggaggtgttcggaacacttgccggcaaaggggtgcaggtgctgtatattttatatttcgcgtttctctgcacgctcattctttctgtatttacacggttattggatatctgggtgctccctcagactccgaattgggtgatcagcttaatgctgatcctcggttctgtctatatcgcccaagccccgctgaatgcgatcgcgaggttcagctttattttaacgccgtttttgctgctgatctctctgccgcttttatacacactgggaaaagccgatatcacatacattatgccgatttttcacggaaccgcaaaagacatgcttaccggggtgcagcaaacacttgtcagcattaccggctttcaggcggcgcttgtgatcgggccccttatcaactgcaccgtcagccagcgctacaaaatactgacgatttcaaacggcttgattatcctttattacctgtatatcactcttacttgctttgtcaccatcagccccgaagaaataaaaatgatcccggagcctgtgctgtacctgttaaaaaccgtttcattcagaattatcgaacggacggatctgctctttttgacgttttggttcgtgaccgtcttttcaacgctggccaacgtgttttacttggcaagcaccggcatcgccaagctgttcaatcaaaaagatcacagccggtttgtttatccgctggccctgctcgtcttccttctgtctatttgggccacaagcacagataaaacgatacagcagctggatcagtttttccgcatttccgatattgtgtttgtgtatttgtttccgttgtttatggtattgattgtccttgtacgcaaaaagggtgtccgccatgcgcattaaaaaagcggttcttatcagtctcatgtgcgcaagcctgacacttgccggctgctgggatcaaaatttgttgaaagatatttctctcgtgctgaccgcaagccttgatgttgatcatgacggtaaaaataaaatcggcattacctatcggaaggttcagtcctcccaggcggaacaggaaacgggcggctcattcattacgacggtgctcagcgcttccggacacaccatccgtgaagcgcggtttcaattggataagcttgtcgaccagcgcattgacacgtccaagcaaagagtcttattaatcggtgagaaaatggcggaaaaaccgctttttccttatctcgatgtcttttacagagatccgaaaagtccgcttctcgctcatccggcggttgtaaaagacggcgaggcgattgaagtgctgaagctgatcgtccggcagaaattgatcgtcagcaagtatttaacgaatttattaacaagcgctaatgcggaatcaaatatcagcatggaaaatttgcaatccatccgttcaagcatgctgacggctgataaggatttcgcccttccttatttatcgattaacggacagacgataaaggtagagggttctgccctgttcagcggacagcggaaagtgactgaggtgctcggtcaggattcgaccctcctgacccttttaagcgggcaatttaataaatcggctaatattaatctgaagctgtgggacaaatacaaaatggatattgaaaattatctttctctcggcatcacggatgccacgcgaaagattgtatttatagatacagatccgcagcatataaaagtgaaaatccgtttaaagctgaatgcacgcgtcttggaatatccgaaggacaaactgaattcttatacggcaatcgaccaaatgaacaaacaagcatcagcaaatttgaacagccaggccagatcggtgatcagccatattcaggagcacaactcggatatcctcggcatcggccggaaatatcaaacccattattatgagcggggcaagcggctcaattggcgtgaggtctatccttccatcgagataatccctgatatcaaagtgaatatctcgcaaatcggcatcgtgaactaaaagagaccccggtctctttttttgttgccaaccgaaatgattcgtggtactctttttgtgtaaacggttacataaatgaagggggagtgtttgttggtaacgattaaagatgtcgcaggcgctgccggcgtctctgttgccacggtctcgcgtgtcctcaatgacaacggctacgtccatgaagatacacgaacgaaggtcatgcttgccatggagaagctgaattattatccgaatgaagttgcccgctctctttataaaagagaatccagactggtcgggcttttgcttccggatattacgaacccctttttcccgcagcttgcccgcggcgctgaagacgagctgcagcgggaaggataccggctgatcatcggcaacagcgatgaagaattggaaaaagaactcgactacctgcaaacatttaaacaaaatcaagttgccggtattttggcggccacccattaccccgaccttcccgaatacagcggcagcctttacccggtcgtatttctggaccggacaaaagaaggcgccccatccgtattcagtgacgggcgggcaggcggaaaacgggcggctgaggaaatgcttcgcggcaaaagcacaagcatcacgcttgtcaaaggcccaggccaccttccgaccgctcaggaacgttttaacggcgcacttgatgtgctgtataaagcgggcgcgcagttcaatgtcatctccgccgcttcattttctatcaaggatgccgccgttttagcagaaaaattgtttgcagcataccccgaaaccgacggagtcattgccagcaacgatattgcggcggctgccgtcctccatgaggcgctgcggctcggcaaaaaagttccggaggagattcagatcatcggatacgacgatattccgcagagcaggcttttgtttccgccgctttcaaccatccgccagcctgcatatgagatgggaaaacaagcggcaaacctgctgctgcaattgataaagaaagagccgccgaaagagacggccattcaactgcccgtgacttatataagaagacaaacgacgagaaaggatgatcaccatgagtgaaatttgtgttatcggaagctgttctatggatctggtcgtcacatccgaacggcgtccgaaagccggagaaaccgtactgggcacagactttcaaaccgtgcccgggggaaaaggcgcaaaccaggccgtagccgcttcccgtctgggcgcaaacgtatatatggtaggaaaagctggcagtgacagctacggaaaagcgattattgaaaacctgaaggcaaacggtgtcaatacggactatatggaaacggttacacataaaaaaagcggaacggctcatattgtgctcgcagaaggagacaacagcatcgtcgtcgtaaaaggcgcaaacgatgacatctcacccgattatgccaaaagtgcgctggaaaaacttcccggcattgatatcgtgctgatccagcaggagattcctgaagaaactgttgaagaagtgtgcagctactgccgcgcgcaccaaattccggttatcctgaatcccgcgccggcccgcccgctgaaacaatcgacgattgagaatgccgcatatcttacgccgaacgaacatgaagcatccattttatttcctgaccggacgaaagaagaagcgctcgccggctatcccggcaaactgttcattaccgaaggaaaacaaggcgtacgctactcagacggcaccgcggaacggcttgttcccggcttccctgcagaagcggtcgacacgacgggtgccggcgatacctttaatgcggcacttgccgtcgcgctcgcggaaggacgggacatcgagcaagcgctcctgttcgccaaccgcgccgcctccctgtccgtgcagcacttcggcgcccaaggcgggatgccggtcagaaaagaagttgaggagctgctgtcatgaaaaaacacggaatgttaaacagccacattgccaaagtattagccgatctcgggcatacagacctcatcgcgatcgccgatgcgggtctccccgtccctgacggcgtccctaaaattgatttgtccttaacggcgggcattcccgcctttcgggatgtgaccagcctggtagccggggagatggccgtcgaaaaggtgatggccgcctccgagatcaaagacgaaaatcctgagaatgcaagtttcatagaaagccatttctcagcgcagacgatcgagtacatgtcccactcggaattcaaacggctcacacagaaagcaaaagccgtcatccggacgggtgaaatgacaccatacgccaactgcatcctgcaggcgggtgtgattttctagaaagaagggatccagcatgcacatcggcatgacagacattcataaagcattcggcaaaaaccaagtgctatccggcgtctcatttgagcttctgccgggagaaatccacgctttaatgggagaaaacggagcgggcaaatcgacgttaatgaatctgctcaccgggctctaccggctcgacaagggaaacattacgataaacggaacaaatatgaatttctccaatccaaaggaagccgaaaagcacggaatcgcctttatccatcaggaactgaatatatggccggacatgacggtgcttgaaaatctttttatcggcaaagagctgacgacggcgttcggcgttttggaaacgaagaaaatgaaagcgctagcaaaatcacagcttgaaaaactgggagtctctcttcctcttgaccgggaagccggacaatgttccgtcggccagcagcaaatgattgagattgccaaagcgctgatgacaaacgccgaagtcattattatggacgaaccgaccgcggcgctgaccgaacgggaaatcagcaaactgtttgacgtgatgacggcgttaaagcgggacggcgtatccattgtctatatttctcaccgaatggaagagatattttcaatttgcgaccggatcaccattatgcgggacggcctcactgtcgatacggcgcatatgaaagatactcattttgatgaagtggtcaaaaaaatggtcgggcgggagctgaccgatcggtatccgacccgcacgccgtcactcggcgataaggtgctcgaagtgaaaaacgcctcaaaaaaaggaagattttcacagatcagtttccatgtgagcgccggagaaatcctcggcgtttccggcttaatgggtgccggacggacagaaatcatgagggcgctgttcggaattgaccggctcgattccggagaggtctggatttccggccgaaaaaccggcattcggggtccgtacgatgccatccgcaagggactcggcctgattacggagaaccgcaaagatgaagggctgctgctggatacgtccattcgtgaaaatatctcattgccgaacctgaccagcttctctccgaaaggcatcattgaccgaaaacgcgaggcggagttcgttgagctgctcatcaagcgtctgaccattaagactgcatctccggaaaccgccgcccggcatttatcaggaggaaatcagcaaaaagtcgtcatcgccaaatggatcggaatcggcccgaaagtcctcatccttgatgaaccgacaagaggcgtcgacgtaggcgcgaaaagggaaatctattcattaatgaatgaactgaccgatcgcggagtcgccatcatcatggtgtcttccgagctgccggaaattctcggcatgagtgacagaatcatcgtcgtccacgaagggcgcatcagcggagaaatcaatgcggcagatgcaacacaagaacacatcatgacacttgccacgggagggcagcagtatgaaaactgaaccaataacatcaactgaacaaaagcgattttccattcataccttcacgcaaaaactcggtccgtttctcggcttactgattcttgtgctgatcgtttccgttttaaacccgagttttcttgaacctctcaatattctcaatcttcttcggcaggttgcgattaacgctctgattgcattcggaatgacgtttgtcattttaacgggaggcattgatctctctgtcggagccatcctcgccttatcgagcgcagtggtcgcaggtatgatggtctcaggcatcgacccgatcttagccgtcatcatcggctgcgtgatcggcgccgtactcggcatgataaacggattattaatcacaaaaggaaaaatggcgccgttcatcgccactttggcgacaatgaccgtctttcgcggactgaccctcgtctatacggacggaaatccgattacggggctcggttcaaattacgcatttcaattattcgggcgcggttattttctcggcatccccgtacctgccattacgatgctgattgcatttgcggccctgtgggttcttctgcacaaaacaccgttcggccgccggacatacgccatcggcggcaatgagaaagcggcgctgatatcgggaatcaaagtgccccgcatcaagatcatgatctattctctgacaggtttattatcggcgctggcgggagcgattctgacatcacgcttaaattccgcacagccgacggccggagaatcatacgagctggacgccatcgcagcggtcgttctcggcggaacgagcctgtccggcggtcgagggcgcatcatcggtacgctgatcggggttttgattatcggtacgctgaacaacggcttgaaccttctcggcgtatcatcgttttatcagctcgtcgtcaaaggaatcgtcattttaatcgcggtgctgctggaccgcaaaaaatcggcatagtaggaggaccattatgaagaaagccatcatcacgatcgcggcattatcactgtttttgctgtccgcctgttcacttgaaccgccgcaatgggcaaaaccgtcaaacacaaaacataaaaaagaattcactatcgggctctccgtctccacattaaacaatccgttcttcgtttcattaaaagaaggcgttgtaaaggaagccaaaaaacggggcatgaaggtcattattgtcgatgcccaaaatgattcatctaaacagtcaaatgacgtagaagatttgatccagcagggagtcgatgcgctgctgatcaatccgaccgattcatcagcgatttcaacagcagtcgaatcggcaaattccctcggcattcccgtcattgcgctggatcgttcagccgaacacggcaaagtcgaaacgcttgtcgcctctgacaatgtcaaaggaggagaaatggcggctgactacctcgccgatcagctcggaaaaggcgccaaagtggctgaattgcaaggggtgccgggcgcatccgcgacacgggaacgcggaacgggctttcatcatattgccgacaaaaagctggatgtcgtaacaaagcaagcggcagattttgaccgcacaaaaggattgaccgtcatggaaaacctgctgcagggacacccggatatcaaagccgtgttcgcccataatgatgaaatggcactcggggcgctcgaagcgattaacagctcgggcaaacacattttggtcgtcggtttcgacggaaataaagatgcgatttcttccattaaaagcgggaagctgacagccacggtcgcccagcagccggagctgatcggaaaactggcggccgaagcggcggagcaggtgctcaaaggaaaaaaagtcaaaaaaaccatttccgctccattgaaacttcaaacgcaaaaataaccggctgatgtttagacttccggtaaaacgtgaaaggatgaagtaaaaggagagatacagatgaagaaaacagccaaagcggcatccattctgacccttgcagcgggaatatcagcggcttcagctgccggaataacgcctcttcccgagacacacgcgcaagaagcggtcaaaattgacgatctgtacagctacccgcttgactcttatctcgtttccgcggaagcattgaacgtgagaacaaaagcatcagcagccagtccgagagctgatacccttcatttaggcgacagcttaaagatcgtttcattccagaacgctgactgggcaaaagtacattataaaaacggaaaaacaggatttgtatctactcattatattgttaaagaagcaacaaccgtaaaaacgacggcaaaaacaaaagtatatacagacaaacaagcggtcacagcttcccttgccaaaaacacgagcgtttctttcctcggatggaaaaagacagccggcggcggcattgatttcggctgggcgcttgtcgattacgggggcgcaacgggatatatcagcacaaaagatctgcaaaaactgacataatatcaaaacggatttcgcaaattcagcgcgaaatccgttttttctttcttgagcagtcagaaacgtctaaggttcgaaatatttctcaggaaatattgtcggatgaagatgaatgcatacgactctaaaatggcttctttatgtaatccgccaggcgtttggcgttgtcacggatagccgcagcatcggcgctgctaaccccgtacatcgcgaaagccggcaaataggtcattcccgtaaaattagccattgcctgaaacggccttaagagctcgctcagtgaaaaatggttggacccgcctgcctgatatgcatcctctccggcacctacagaaacagccagcagcaattctttgccgtgcagcgcctttcctttggaaccgtaagcccagccatacgccagcacatgatccatccatgtttttaaaagcggaggcgcactgtaccagtacagcgggaattgaaatacgatccggtcatactgttcacacagctgccgttccttttccccatctattttcccgtccggatattctttataaagctcacgaaccgtgatgtcatcatgattttttaattcttctgtccacgccttattgaccgctgagttgtccatgtcaggatgaaccgctaataccaatactttcacagctaccacacctttcccttttgactgtattttacctaatctttgccggttcagccaaataaaaagaaagccccgagaaaaatgaggctttcttttttattttattccgggcttccttcggttgtttcaatatccttcgcaaaattcggattatctaaatttgcgttgaaaaagtccgccgtattcggaagcttgaggttcatattcattttttgagaaatggtcactttacaatctttaatgacatagtcaaacacgtgtcccccggaattgcgtccttcatcaatgaagtgcaggtgatatccggaaacagcgatgccgtttgcgtaacccggcgtccagaagccggcgattgtaccctgaatgtcgtcaaagttgaacacaggctgtgttttcaccgcttcaatcatcggaacgtacggtttctcctggcgttctaccgttcttgtctgcacctttttaaatacgccgtctaaacggatcgcataaaataagtttttactaggcagaaggctggcgatttcctgctcgaattcttcacgggtcatttcgccgtcgatcgtatgcgtcatgtccggcgtgaaaaatgtgaatgagcagaatggtgacaggtctccgcctttaacaggcgtagccgttccgtcgccgcgcagacggtaaaattcgccgtcaaatccgattaattcgccgtccagtttattgaacgtgccgatcccgaaatcaccgaacttcggaatgtcagccatatcaaaatctccgtcatacactccgtccagcagagatgtcatggtggatacttgatagatttgatcctcaggtgagcctttttctccgcggctcatcatatggatgtcgcttgcgtttttcatattcccttcactccttttaaattgggctgttttagaaaacaggtcatggtgcgcagagtgctagagagcttttgctttcattttttctttgaattgcttcggaagcatgtcgcttgataaatggacattgtcactgtaatcgacaggaatgtcaatgatgacagggccttctgtgttcaagcctttttgcagcacgtctgccagctgttccggtgactcaacgcgcaagccggtggcgccgaagctttctgcatattttacgatgtcaatgtttccgaaatctacgcatgatgtacggttatattttttcatttgctggaatgcgaccatatcatatgtgctgtcattccatacaaggtgaacgatcggcgcttttaagcggactgccgtttccaattccattgcagagaacaggaatcctccgtctcctgaaacggatacgactttttcacccggattcaccaatgtggcggcaatcgcccaaggaagcgctacgcccaatgtctgcatgccgttgctgatcaacagtttcagcggctcataagcgcggaagtagcgggacatccagatcgcgtgagaaccgatatcgcaagtgacggttacgtcgtcatcaattgcattgcgcagttcttggacgatttgcagaggatgcactctgtcggatttatgatcgcttggcgccttctcgctgtctgtgagcatctgttttaactcgctcagcacttctttttcacggctgcccatatcaaatgtcacagcgtcgtgttcaatttgtttaaccgtagcggggatatcgcctaataattctaattccggctgataggcatgatcgatatcggcctggatttcgtcaagatggataatagcacggtcaccgtttacgttccagaacttcggatcgtattcaatcggatcataaccgatcgttaatacgacatccgcctgttcaagcagaagatcgcccggctggttgcggaacagtccgatccggccgaaatattggtcttccagctctctggacaatgtgccggccccttggtacgtttctacgaaaggcagttttgttttggcaagcagtttgcggatttgttttaccgcttccggtcttccgcctttcataccgactaacagaacgggaagtttcgccgtctggattttcgcgatagccgcgctgaccgcctcttccggtgcagggccttgtttcggcgccggcacgctgcgtacgtttttcacatttgtgatttcattcacaacatcctgcggaaagctcacaaaagccgcgcctgcctgacctgctgacgctgccctgaaggcgtttgttaccgcttctggtatattccctgtttcctgtacttctacactgtattttgtaatcggctgaaatagcgccgcattgtccaatgattggtgtgtccgttttaaccggtctgcgcgaattacgttacccgccagcgccactaccggatcaccttctgtattagccgttaacaagccggtcgccaagttggatgcccccgggcctgaagtaacgagacaaacgcctggttttccagtcagtcttccgacagccgcagccataaatgcagcgttctgttcgtgacggcataaaaccagttcaggtcctttatcttttaacgcatcaaatactgcatcaatttttgcacccggaatgccaaaaacatgtgtgacaccttgctccactaagcaatcaacaacaagctccgccccccgatttttttcagaggtttttagttcatttgttgcttttgccaacaccctcactccttattatgcatattaaatataaaattttaagtaatttgtgatattattcactatacactctttggaaattgacctccaatatcaattcgccgtatgattaatatgtttcacgaataattaacaaagagaaaggaatggataaggatggagcttcgccatcttcaatactttattgccgttgccgaagaacttcatttcggcaaagctgcgcttcggttaaatatgacacagccgcctctcagccagcagatcaaacagcttgagaaggaagtcggcgtgaccttattaaagcgcacgaaacgggttgtagagctttcagctgccggagaaagttttttaaaacacagcagaaacgcgatcgaagaaatagacaaagcgattgaaatggcgcagagaacggcgcggggagagctcggccgccttgtcgtcggttttgtcggctcggccacatatgaatttctgccgccgatcattcgggaattccgcgaaaaattcccctccgtcaagcttgatctgcgtgaaatttcttctttcagacagcaggaagaacttctgaaggggaacattgatatcggcatccttcatccgcctttacaacattccgcgttacatatggaaaaggtgcagagcagcccgtgcattctggctttgccgaagcagcacccgcttaccgctaaacagacaatcgacattcaggatttaaaaaatgaaccgattatcacactgtcgaaagaaacatggccgactttatacctggagtttgtaaactactgcgagcaggcgggcttcaaaccgaaaatcgttcaggaagcgacggagtatcaaatggtgatcggattggttagtgccggtatcggtgtaaccttcgtgccttcttctgctaaaaagctgtttaatctcgaagtcgcctaccgcggcattaatcaggcgcagctcactgccgaatgggtcattgcctaccgcaaggataatcaaaatccgatcctgaaacattttctggatattatgaataagcgccaggctttattgcaggcggataaggaaaatgcataaaaaagagggccgccgaaagcagcctcttttttttgtgcttttatggatttttactaaattggtagaaacgctcagtacaccttacgacctgtacccgtatacatacagtacaactgatcaggagggataaaaataacggggcggcaatgacccatcgaaaaggaggcagaacacattacacatattaccgtcattttgaccctgatttctttctttgtgaccattatttttatattttggagacccgggggattaaatgaagccgttccggcgtcgctgggcgccattctcgttttgttatgcggaaccgtttcctttcatgatttgggggatatagggtcaaaagtcaccggagcatcaataaccattatctccacaatgataatggcgatcgcgctggaaagcttcggtttttttaactgggcggcggccaaactgcttcaccgcgccaagggatcaggcatccggcttttttggctgaccaacctgctctgtttttcaatgacgctctttctgaataatgacggcagcgtcttaatcaccactcctattttactattggtcttacaatatctcggacttaaaagacatcagaaaacaccgtatttaataagcggcgtattaattgcgacggcggcaagcaccccgatcggcgtcagtaatatcgtcaatttaatttctctcaaaatgataggcatggacctttatttgtacaccaatatgatgtttatccccggcacgctgggactggtgtttatggcctttctgctgtttgccgttttctaccgccgtttgccgaaacagctccccgatattccggttcattttgaatcgctggaacacaaacgatatcatccgcttcagcctccgccagacttgtcccaaaaaaacagccgtacgaacatcatgttttgtgttttggtatttgtattgtttgtccggatcagtctgtttgcagcttcttacaacggcatatccgtttcgctcgtggctgtcatcagttcagtcatcctgctttgctggagatggttttatttaaaaatcggaccggcggacttattaaggaaagcgccttggcatatctttatttttgccttcacgatgtacattatcatttacggactgcataatatcggactgacggcattgcttgttcagtctattgagccttatgtctcacaaagcattgcccacgctgcatctattatgggcattgctacatccgtcctctctaatttgttcaataaccatcccgccttaatgatcagcactttgacattaactgaaatgtccatcgacccattaaccgtaaaaatcatttatctggctaatattatcggcagtgatatcggatcattgcttctgccgatcgggacattagccacactgatctggatgcatatcatcagacagcacggcgaaaaagtttcttggtcagaatatatcaaaacgaccattgtcgttgtccctctcaccgtcgtgtttaccattaccgttttatatgtttggatcagctggatttacctttagctatgaaaaaaaactgcctgctgtataagagaggcagttttatcatttatggcaggtgcatggtttttaaatgattcaatttccaaaagacagtatccccgtctgcattggtcaattcaagaatattatctgagacgtcctgtaacagccccactttattcggtatatctcctaaatccagaataatcagcttcccgacatatctttttaattgctcctcaaaattccggacaaggggcacattagcgggaacaaccggcagctctgaactgtttaatgtatacggcgtctgctcatcggaatagggtgtcagccatttcaaatgatgcatcgagatgaaaagagtcttataaaccggagagaagaaaacaaaataatcatttaaaacacttgtcacatacccatgaatggaacggtctcccgtaacgaaaatttctgtaaatctgccttttatatgctggagggtattccggtaagaaaaggaatgttcctgtttttcgggatgcggacttttttttcttgcgtacggttctttattctcttcgtccgggagcgtcaatgtcatcctctgaagatgcagcagcggaatataaagaaacgtccggccgtcatgaatcacaatgatatcctgaccgatatccaaaagagttcctgaaaatgtcgtattccccgatatctcaatatcgacttgtttatcaagaaatctgcttaatccagccatttcattcccccctctcccgcgtttacggacaatctttccaatcatttacggccgtgtttccacctataatctattgtccttaatacagtggcgtagctataagagttctcttcctcccgttttgaggatcgaacggatcttgacgatcttttcgactttttagaggaagtacgctgctcttcgcgagattcttcttcatgtgacttttcttcttcggcgctctctttcccgcctttattctcgtcgtctttattctcctcttttttggctgctccttttgccccttcgctgatgctcttgatatgaaaaggatagatccgcagcacttctttatctttcacaagagtgtagtggccgtcggaattatccacaagtataccttcaacggcttcaggacctccgcggttgatggatacccatttgtggatcaggcgtttaaatatgccgtgaaaatcatcagccatttcaaattccgggcgctcctcctcctggccgtcctcttcttgttccgcgctgatgcttttgacatgatcggcgttaaaatatacgattccgtcatcttctgtttccagcacgagaaaatcatcccctgtttcgtgaagctttcctcttttcgattccggacctccctgattcaattgcaccgtgcgattggtcatccggctgatcagatcttgaaaatcatcagctttttcacattctgccgcttcggccggcgatacggtttcactcgtattttccgtcacacttttcacgtgtttccattgataataaacgattttattatcaacttgaagagcgatataatccgattgaatgtctgctaatctccctgtcttggactccgggcctccccggtagacagtaattacttttccttccatcgcatgcaaaaagttgtcatcagaccgatgccgcttcgtattgcgtttcatctattgtcctcctagtcatttttctcataatgtaaaaagcataatgcatatatacgtatcacgattattttcgggaactgattcaccagcctatttgtaaaaaatctttcttcatttccaaatcagatattccaccgctctaactcactgctgatgaaggcggaccgctccttaatgtattcgcaaatcacatcaggctcccggtcaaagcaatcaatctcctctttcttataaggatcctttgcgacatgcggcctgatctgctcatacagtgacatgaccttcggcttcatatgttcaatggtaaaccgggtctgaagcgtttcttccaaaagctgtttgtacgctttgcggaaatacggttcatccagaagccttgcagtcaaggtattaaacccttgtattctgacataatcggcctccatccgatcaccgtgaatgtctcttccccacgtcgcatcgtaatcccacggaatgacttcaaaaagtcccgtttcatgattccggtacaaagcgtaattatgaacaaatccatcgtagtttgaggtaaacacgatgcccgcaagccaccgcaaatacttatcggcgtccaagtgtttgacgatctcccccttgaactctgacttcggaacggtattaattttatagatcatgtcctgcaagtataaatcgtcttctttcgttcccgttttcttttcataaccaagttcgagcgatgttttcgtatcccgctccagatcactgacaagggagaaattggcgtcgtcatcaaccgcgtaaaaaacagccccgtccgccaaattccgtttcgccagaaaatattcatccactgactccagctcaagatacaccccctcatgtctgccattgatttgcagggttacgaaattcgcctttggtgacagcgtcccaagctccgcgaagaaatcgagagacagcttattccgcatcatcgacggatctttgtattcagcgtttaaatgtatctctttcgccctgcgaaatgttttcggcgaataaaaagcgatgtgatacgattttttcttaaaatctcttatatgagagccgcggtacgccagatcaatgtcaagccgtttttgattcactctcagcaccgcgggcaccggatcatcatcccaaatgtcttttttcagctccattaagtctttcgggtgaataaacagctggtatagaggcaatgttgattggtctttcatcagtaaccctccctgtattaatttaggctgtgctatttatataaaactcagcgaatcacacatacacttttttcattcatgcgtactatgtggtagtaaggatcgcatccttaaaacatatatcatgaggaggtttcaaaatgggccactattcccattctgatatcgaagaagcagtaaagtccgcaagcaccgagggattggaagattatttgtaccaagaaccaaaaagcagtaagaagagaaaatctcgcagccataaaaaatcccgttctcacaaaaaatctcgcagtcataaaaaatcgtgccgctctcacaaaaaatctcgcagccataaaaaatcgtgccgctctcacaaaaaatctcgcagccataaaaaatcccgttctcacaaaaaatctcgcagtcataaaaaatcccgttctcacaaaaaatctcgcagccataaaaaatcgcgccgctctcacaaaaaatctcgcagtcataaaaaatcccgttctcacaaaaaatctcgcagccacaaaaaatcatgccgccgcaagaaaaaacgcacgcagaaaaaaccttaccgtcctcataaaaaagacccttgcaaaaaagacgattactgcagcaaaacagagtactggaaagacgggaacatctgggttgtaaagaaaaactacaagtaacgccatttgtaaataggctgccggctaaacggaagcctttttcctcaatcagatatatgccacgtgataagatatgcagccggttttcttttgttgtgtttccgaattttctttctgtataatcaggtcatacgataaagaaaggcggccgaaatcatgcatatcttacgagcagacgaactgaacgcaaaagacacctacaaattgctttcgggcacagtcgttccccggccgatcgcatttgtcacgacgcggtcatccatcaacggcgccgtaaacgcggcgcccttcagtttctataacgttgtctccgcagaaccgccgcttctggccatctctgtcagccgcgcggacggacggcagaaagacaccgcgagaaacgcaatcgctcatcgggaattcgtggtgcacgtcagtgatgagtccattattgaagacattaacaaaacggcggcaaggcttgatcctgatgtcagtgaacttggcatgacagacctttctgtgacagacagcgcctgcatcagcgttcccggtataaaagaagcaaaagtcaggtttgaatgtatactcgaacgccatcttccgtttcaaaatgacagcggagaaacgacgacagacctcatcatcggcagagtcgtttgttttcatttgaatgaccaagtatatgacgccgataaaggctacatacggacagatgagctgaagcctgcggcaaggctcgcggggaatgaatacgtcagactcgggaagacatatacgcttgtccgcccgacctgaagcaggaaccattataatagaagaaactagtcaaaaagacccctttcgaaaggggtcttttttgagtcttttaccattaaactcagcctaatgtcttatagaatgctgaaacttacaaggccctcacccatatgaaacgagtgacatttttaggaggagacgatggatttcattcagttactgattttttcagccgtatttattttgctcagccttatgtttcaagtatttgccgtcaaagttcttcattttccaaaggctgttaaaaagcagaagccgataaacggcacacatcgattaatcgaaatcacactgcttattacgggcatcgcagcggtgactttgttcaatgaaatgtacgtatttgcgggagttgttttcatgctattttgctgcagcggcttaatggaatggcggcaccggcgggaggaaaagcaatatgtgtacgattcgttttacgcaggtctttctgccgctcttggcgtgcttatttttttcatcagttagcgtatcatgctctatactcctgcggccgctccgtcgccgcgcgggtcggccccgccttggagaaagccttcttcatcaatgacgatcgctgccgcatggcccataagcccgtcaaaatcaccaacggtctcgacgcggtggccgctctgccttaaggcttctctcgtttcagggctgattctgctttcaaccctcagcccttcatactcctctccccatgtccgcccccagacccagcgcggctcattgatcgcctgctgcgggtccattttgtaatcaatgatgcgcgtaatcatcgctgtctgagtttgcggctggccttctcctccctgggttccgtacaggatgtgcggctttccttctttacaggccatcgccggcatgagggtgtggaacgtccgcttgccgggttcaagtgtattgacatgggattcatccagcgaaaaaaatgacccgcggttttgcagcagaatgcccgtctcccccgccgtaacggctgacccgaattcaaaataaaggctctgtataaaggaaacggcatttccttccgcatctctgacggcggcataagcagtgtcgcttccgaccggacggcttagcgccggcgcagccgtgtcaccgatttcttccgccagctgctttgcataccgtttatcaagcagccgatccagcggaatatgagaaaatgccggatcagtcagcacttcattccggtgctgaaaactcttcttcagcgcctcgatcagcagatgataatagtcaaaggagccgtgttcaatctgagaaaaatcatagttttccaatatattgagcgtcattaagcctgtaaagccctgtgaattcggcggagcctgatagatgcggtatccgcggtaatcagaggataccgggttcgtccactcgccgcggtgggctttaaagtcatcaagtgtcagacggctgccgttgttttgcagaaaggatgtgatgctttgagcgagatctccttcataaaaagcgcttctgcctttctcggcaagctgttccaagctggccgccagattcttctggacaaaccgttcaccgggcatgggcgcttttttgtttctcgtaaaaatggccgaggtgtaaggcatcgaggctaaaagagcgagattgcgttctgtgtgggcgcactggtcggcggacaccgggaatccgtttgccgcataatcaagagcaggcttcagcacctcagcgagcgaaagacgcccgtacgccgaaagcacggcatcccagctgtccgccattcccggaacggtaatggcgctttctggcccgcgcagagggatcgcttctctgccccgatacaagtctctcgtcacatgcttccctgaacggccgctcccgttataagctttgattcgtcccgtttctttatggtaagtgagccaaaatgaatccccgccaagacccgtcatatgcggatacacgactgccaggcaggcgctgaccgccactgccgcgtcaaacgcgtttcctcccttttccagaatgccggcccccgcctgagaagcaagataatgcggactgacgaccatttgtttcgttccgatggttgaagtattcatggcaagcccctttacaaattttcctaagtataaaaagcggcttcaccggtatccaccttcctgaaagaaaagctcacacactatttactttccgataagaaataatcctaagttattacgtaacgaaaacaataaaaaaatttccccttcataccgtaacatttcatgatacaataatatccaccaaatgaaggaaggtgaagccggttggaacatgagtacagcattccgaatcttgtccttgatgaaacggataaacagattctctcgattttgcacgaggaagggaggatttcctatacagacttaggaaagcgggttaacctgtcgcgagtggcggttcagcaccgcattcagcatttactggatgccggtgtgattgaaaaattcaccgctgtcatcaacccggcgaaaatcggccgtcatgtgtccgtgttttttaacgtggaggtggagccgcagtatttggaggaaaccgcattaaagcttgaaaaggagccggcggtgacaagcctttatcatatgaccggaccgagcaagctgcatatgcacggcattttcgcaaatgatcaggagatggaagagtttttgacaaaacggctctatacgcaaaaaggcgtcgtcagcgtcgactgccaaatgctgattaaacggtataaaagcagaacgggcatgaagctgtaaggaggacatagccatgaaacatccctattgggacattacggcggcgatggtccgaacgggcattctcggattcggaggcggcccgtcggtgatcccgctcatccgccatgaagccgtcaataaatacaaatggatagatgatgatgaattcggagaaatattagcgatcgctaatgcgcttcccggaccgattgccacaaaaatggctgcgtatctgggcttcaagctgaaaggcacgttaggcgcaatcgcggcaaccctcgcacatattctgcctacatgtctcgctatggcgggcttgtttgcggctgtcaatgtcttaagccgctcagcaatcgttgccggcatgattggcgccgtaacaccggtgatcgccgtcatgctcggcatcatggcgtacgagtttggccaaaaagcgcttaaaggtttcggctgggtcacgggcatcctgttttttatcatcgcttttatcggcctgcaaacgttacagatcaatcccggctttgtcattatcattttcttggcatacggcgcgtttcattttaaattaaaggacaaaatcacaaagaaacgttcaaaagataaaggaatgccggcctcatgatcttgatttatgtatttatggcgtttcttgtcgcaaacgtactcggatatggaggcggaccggcgtcgattccgctgatgtttgaagaagtcgtcaacagatacagctggctctcaaacgatcaattctcaaatatgctcgcacttgcgaacgcattgccgggcccgatcgcaaccaaaatcgcggcgtatgtcggctacagcgcaggcggatggcccggattcctgattgcgctgatcgccaccgtcgtaccgtcggcgctcgcattgatcatcctcttgcgcgtcattcagcgcttccgccaatcccccgtcatcaaaggtatgacgctgtccgtccagcctgtcatcgccgtcatgatgctcattcttacctggcaaatcggcgcagacggcatcaaagcgatcggctgggttcaagcgatagtgattgcggggatttccctccttgtcttgacaaaattcaagatgcatccggcctttctgattatcgcggcgtttttgtatggagggcttgtgattcctcatttataaagaaaagcacctggacaggtgcttttttattttggcccggaaataccatttgatatgacaactgtttcttcgcctgcatcactcttgatgatttgcttgacttgcagcgttgcgcctgccattctcacagattgctgaacctgaggtgaattggtttcagcctgtatccaaacagaagtcggcgctttccaagctagaaagagtgcaagaatcaacataccagagataaccagcagcagcttcatatcgcatcacttcttttcaataaacggctcgcagcggacagcgcctgttgatcatgaagaatatcacccggacgattgccttctcccagcacatagcctttaaaggacatccccataaaatgaaaaatatgttcaaattgctgaatcagcggcagcccttttagtttagggttgtctccgcccactgctgttacatatgcctgcttcgctgacatttgctgtttaaaatcaggaaacctcggatctctcagcgtctgtgaccagcgatcaataaacagctttaatgtccctgacatgccaaaccaataaattggggtggcgaatacaagaatatcacacggtaatatcagctcaatgatagaatcgtagtcatcttgaacaggacgaaagccgccttgggcgtgacgcagatcttcaattggccggatccgatatttccgcaaatgaatgtgctccgcatcgaatccttgaacagccttctccgcaagaatatccgtatttccgccaggcctcgttccgccatgaataaccgcaatgttcatgatgcatctgctcctttgtttacgaatgattttcttcatcatataatggattcatcaatcaatacagatgattatttcgattattccaatcgataaaaccgatttagaaagggcgagatcaaatggaattgaagcagctgatcacctttattaccgcagcagaacacgtaaacttcaccctaaccgccaagatgcttaactatgcacaatcaagcgttacctctcagatcaaatcactggaagaagaaatcgggactcctttatttgaacggctcggcaagcggcttttcctgacagaagccggcaaaacgttcaaatcctatgcggagaagatcattgcgttaacagaagaagcaaaaatggccgcaaatcaagcaagagaaacaaccggaaccttgaaaatcggcgcgacggaaagccagtgcacataccgccttccgcctatcataaaagaattcaaacaggcttttcctcaagtaaagcttatattcaaaccgtatatttccaacgaacaagcgaaagaacagctcttgcagggccagcttgatatcactttcattttggatgtgaatcggtcggaagacgcactgcacgttgaatctctgattcaggatgaaatcaaaatggtagccgccaatgaccatccttttccagcagactcaccagcagcattgaaggatcttcaaaatgaaacccttctgctgacagaggacggctgttcatatcgcacgctctttgagaacactttacatgacgccggagtctaccctaataaattagaattcgtcagcatagaagccatcaaacaatgcgtgatggccggactcggaatcggactattgcctgaaatgacagtaaaagacgatattgccgaaggacggatgaaagaactcaactggcagaatgaatgccccgtttttactcaactagcatggcataaggacaagtggatgtctgcgccattaaaggcatttatcgatttgacgcgaaaaacattcaaataaaaacctgctgcaaggacgacaaggttttttaaagcagacaccaggcatacaaaaaaaacacttggtggcttagagctccaagtgtttcatgtgatttttccgataaaacgttcgcaaaacatgcgtttcaaggtcagccagacggacagggatcggcagcctgctttctcgattgatcattttcattgtgatctgatagctgctttctaaatcaatgttatgtccgcaagacaagaagataggcttcacgtcccgccgtgtccgaagcgcccagccatatacctcgccgtcaatgagaatatcggtgtaggcgcctacttcattttcaggcatctcaaaatcgcagcctttgattttgagataggttttcgcaatcccaatcgtcggcttccccagaaaaaaagccgcatgggtggcaacgcccatatgattgtaatgcagatacccgttgccatcaaacaaaaacacatccggctccgtctccagctttttggccgcttcgatgatcagcggcagctcgcgaaacgcaagaaaaccggacacatacggcacgctgattttccccatgctgtgcactttttcaatcacttctgttgtatcagcgtcaatcacgatgatactgcacaccccgtacggttccccgtcctgctcccaataagcgaggtcgacgcctgcgctggtgttgacggagtctggatggatgacgggggataggttgattttatgtataagagattgttgagttcgaataaaatccgattcatctttttgttcaaaatcgtgaatttgatgtattttcatttcacttgttttcctctcttaaaatagtcttcgcgctcaatcgtcctgtgtttcgatctagcgaagactccatatgcttcattgaaaaaagcagatagtataatctgctttttattaaaattcatttttcatttctttcataaaaataagatccaattgtttaagtaattctttaagttcagtacacataatatcttctaaaggattttcccaatctttgttttttatcagttcaatgccataactgccggttggatccccttctgggtaccaccctacaagcagcaaatttttagttttatgagaaactgcaggagatcttgattaaagtcaaataaccaagcatcatcattttcctctagagttttagggtcagtatcttttaatggaatataatcaacagtccaccccgctggtatcttaagccttaagaaattgggaacatgttggcttaggtgctgcaaaccctctaaaaccccacttcccacagtccagatttgatattccaactcttccaataattgttctatttcattaaaagagtcttctttataaatcttatctgtttttaagcccgctactatgacatggtattaatcattttcaaatattaccttaataacagcattacgtttttcattttgtagttttagtaattcatatttttcttgcattcttttttctgaacttaaattgttcagtactacagaccagccattacagatttttaatggcagcaattgagaaatatggtctctatccataactgcttctccttgtactccacattgttaaattattataaaaaaacttgccgataacaacaaggcaagctcttaactatagcaattctaatacatcagtaaacaaggcatctcctaatgttaatctcctgttgaaaggctgtatatgtggcaattcactccactcatacacagtatcgtagtaatcatacaaataactgagttcgataaaccctttctcttgcattattttattaatatagttcgttccctgaatgaattctaaagattcagcggttcctacaatgtcataagcgccatctattaaatcgtgtcttagggaataactataatctaatacataaacaggaaccaatttagatactttcatattgatttgctgttctaaatgaaaaccattttccccagaaagatcttgcaaatggatatcaatttctcctgaaggattgtttaaatctctaacttcaatttttttcaaaccttttatttgattaaattcatcaggtacttttattttctctgcgcatttgctcttgtaccattcgtctaattccctattcacaaatagacgatgaagcaattcaccgatttcagggtattcattaataaatctgattccatgttccatagttttaaccatcccatcttcttgaaggctcgccttttttcgtctgcttaccagttacaggatcaaactctcctaaatgctctgttcttctgcggttccacttttctaatttaccatgctgggaatcccattgccaattaaacccatctctatctgaccaagattttctttttaatctttcttttatttgtatcatacctctttcttccatccagttagttggttcttttaaacgatatccatttgaattgtctccaactatcttctctttatcagctagcgcagcattgtattcttcagtccgtttctttttactgtagttagtaccattatgagcaacataatcattttgagtcatcccctcaggtttttccaaccattttggtttttttgactggctactcgccatcttcacaatcccaagttctttaacagccgtcttttccacatcgacacggactgttgggaatccgtacgtaaagccgttcgctgttactgggcgttctgcgtacacgcggacgtttgtcgggactttgaattgtttaactttttctagtgtcttgttagctttttgaacttttgaatgggttgcaagcggtatgcctttgtttacatgcttcgccaatgcaccggctccaaccaaactcagcgcagcttccagcgccccttgcttccgtttttcctcagacactttgtttccgaacatatcccgtcctgtgacggcttctgtgaatccgtttgaggcgacgaggccgtatgcgcccatttctgtcattttgagaatgtctaaggattttccggttttataggcatctaaagcatgttctgcggcaatgacggtttttccggttttgtaaatggcttttccgcctttgaaagcgcggcccgcccagccgacgaccggtatgaatccggcggcggccatcgctcctgctgtgacgcgttctgcggtggagagtttttcgccggtcaccggatcaacaccttcggctgctcttttataatcataatagccggtgacttcgccggtaaagttgcagatgccgtcccatgttttttcgtaccatggtttattggcttcttcttcagccttttcctgaagccgtcttgcttcggcctgctgggcttttgcgtcaatatagtccgtgccctgtttttctgtcgccatgacgcttttgtagatttcattgctgtggaaggcttttttgtcatagtacataggggaggcgcttttcccgttgctggtggcctgcatgagaagggaatatttgctgagcactgcgttgtccagagattctaagttttgatattcagcggtcagggattcatcaagcgtatcgactgccgtgatcgtgtcgcgtctggttttctgggcatcacccattttatctgcgtaatcatccagcgtatatgtatcgagatgaataatatcactgatgccagacaaaatcgaatcgatttctgctttatgagcggagacaatctctgaagctctcaaatccgcattgggcagctcatgctctaaaaatgaagtctccgcatatgaatcactgagctcttgatctttaatgtcacctgaaatgccatttaaaaacgcaatttgagcagagacaagcgtcagccagctgtcggcgatttccgcttgtccctgaaagaaatcctttatattgtctgcgcctttccctttcaaagcatcacccagatcggccacgccttgaaaggcttgtttgagcgcacgcagctgttcttcaagggcttcgtattgtttctttctcttatctgcttcgtccgttaacgattgtgattcaaacactttgctcatcggcaagtcctttctttcgttattttacagcgatcgcctcgtcctgttccttcaaagaatctacgttgtctttaacgtccgctatgttcttatgaacggcctgcttgtattcgctgatcatcgatacaagctttgcctcgcgggattggtatttggaggtatagtcgagcttgttttttccgtttgtaccggcgttcccgatagaaacggcctccaaagcgctgctgacggattcaagctgcttcatgacggctccgtatttgagttttatttctgccattaaaaccaactccagctttttttgattgattgtattttttctccgaccgtgtcaagggcttcttctcccagcgtcagcaggtgctctgcctctctcgcgatgcttctggcggcaaggagccctcctttttcaatttcaagctgtgtcatctttaagccgattctgtaaatataaccgtcgtatttgtctgtgacgattctgtatgcttctgtatgggcctgatcgcgccggtcatcaaattcttcagcaaaagtgccggtccaatgatgatccaggtgcggcctgaggatgtccctgatttcagacacgccctcttcctgcagagattctatctctcttttcgcttcttttaatttatcaatttggtgttcgatctcgcccagtttatggctgatggtgctgttaatatggcttaatgtgcttgaatggctcatctgttttcacctcgtcttacgcaaaaagtcgtacaaaaagcacagacttttccatactatatttccatatattatattttaaaatagacagaaagcagcttaaataggttaaatgacttattttcagcagccgagatgctcatcattaacgccaaaagactcacacaaacggcatatccattcattgatctcctctatgtatccatgataaattccctaaaaaaaagagacagtgaataaccgtctcctttgccttgtatcatgattctaataatgtcgttaactgcagtcccagttgtacaaaacgtttgagaaatcttttttcttcaaatcttccggtctgataaagaaattggcgattcccacatctccccacatcgaatcaatgtcatcatctgaatcaatttgcaagagcagaatcgtatggttttgatgggaataagaccgcggatcttcctgggtgaaggacgcatagccgccgattttatggccgaatgcgttcaccgtatattcgtcatacacctcatcgtcaaactgctcgaaatagtcgaaggcatccatcccggcatattgcctgaattgaaaatcagacgggagcgcccattcagcagacagctcaggggtgatcagcgcttcggattgaatcggaaaatcgtactcctcttcaacctgaacgaaagaaaaatcatccatgagctcctcttcccgatctgtcacgtgctcaaaatatttgacgcagaaacccgtttgcgcgcacccgtcgtcaaaattcaaaccgtatacgtcatcactgaccgatatgtaaaactgaagaatgccggtgtccggaaaatcaggtagtccgggcatatccgcaaaattgatttgggcgagaagcttcatcggcctgccgctttcatcttcagggtatggttcatgtttcggaaaataggggtctccggcaattttattgtcatacagtcccgtttcagcttttttgacgtgcagtttgataaagggccgtgctgacgtttccagcagaccgcgggatgattccatttgcttcggcaatttccatgtgttttccacgattaatatctccttcgtctctaatgattgtatgataaaaggccggcgcggaccgccggcctttcaagtgacagaatcagtctgaggcacgacggctcttcttccgattgagatatattccacgcccgcctgttccgcttcctcaagcgagtggcagtttctcccgtcgaaaataaccggggtttccatcagctctttgtacgcttcaagcgggaagtgtttaatttgttcccaatctgtcagaatcaggacggcatccgctcccctgacggcttcttctatggactcccgataggaaaccgcagacggaagcagcccggaagcccggaatgacgcgatcggatcgtacgctgtcatccgggcgtcaagagccgccagacgatccgcaatgacaatggacggggcatcccgcatatcatctgtattcggcttaaaagacagccctaataacgcgatggttttccccgtcacaccgcccagcctgttcagcactttatcaaccagcatggactgctggttattgttgactttaatgacggacttcagcaattcaaaatcatgctccacatgtcccgcgatctgcacgagggcgtttgtatccttcggaaaacaggaaccgccgtaaccgatgccggctcttaagaattgattgccgatccgtttatccaatcccattccgtgtgcgactgattccacatccgcaccgactttttcacatatatgagaaatttcattaataaaactgatttttgccgctaaaaatgcgtttgacgcatatttgatcatctcagcgcttctgatgtccgtatgatataccggaatcgcaagcggcgcgaaaacccggtcaagcgtttcccgcgtctgccggtcttcagccccgatcacgatgcggtcgccgtgaaaggtatcgtgaatcgccgaaccttcacggagaaattccggattcgaagcgattgaaatgttcacgtccgctctcagccgtgaatgaataacttcgctgattctgtcattcgttcctacgggaaccgtgctttttgtcacgacgatcgcatctttagaaatatgttcggcaatctgttcggcgacattttcaatataagtaaggtttgcgtgcccgtcttctttttgcggcgttccgaccgctataaaaataacgtccgcttccgcaagccctttttcgtagctcgtttcaaatgccagccgatgccggccgatatttcgtttcatcatatcttcaaggcccggttcaaagataggggacaatccctttctcatctgctcaaccttacgttcgtcaatatctatgcatgttacgtcatggccgatttctgaaagagacactcctgtcacaagaccgacgtagcctgttccgatcactgttattttcatcgtgttcccccaaccgtttagaaattgctgctgggcagcttaccgctattatcatatgatcccggcaccggcggaatgccgggagcctgaggtcatgataggaaaaaacggcgccggccgctgataatagcataagcataaaagaatcatcttgcaaaacagccgcttacgcttcatttaaacgggatggagacgacgattaaaaaagaccccagcgcttacggcgggccacaggcagcggaggttccttataaacggctttgttttcagcgagaagcgccgcattttccgtgagcatgtaaatcagctccgcccctgcttcttttttcagaacgctgatcgcctcctgataataaaaatttctcggtccgagattatgggcgtcagatgcgagaaagtggatcaaattcgcttccatcagctgcagcgaaaaggatttcgctttccgcccgaatgctccggcaatgcagccggccgtcacttgggcggccgcccctttcttcacaagactgtaaaggacggaaggattttcgcgaatttccctgttccgctccggatgggcgatgacggggacatatccgttcagctgcagttcataaaacagcctttcagcataggccgggacatgatccgccggaaattccgccagcacatactttgtattatggagcggggcaagcgagccgctttgaagacctgccagcagatctccgtctattctgatctcctggcctggcagaacagtcagcggaatgccttccttattcaaacgtttgtttaacaggctgaccgcttcgttgaccgtatgccgatccgtgtcatagcggtatttcacatgatgcggcgtcgcgatgatcgtatcaatcccctgtctgaccgcttctctcgccatcttcaggctttctgtatcatccgccgcgccgtcgtctatggaaggaaggatgtgacaatggatatctatcatatttcaatccctccttaaaaagaatggaccgcgcccattgtgacattattgtccgtaataggcgtagtccgaatgtttcgtttgtttcttcccgttcataacggccccaaggagcttgcacgggcagtaatcgagcgcttctttcgccttggccgctttttctttgtccgttttcccgcttgagatcaccataatggccccgtcagtgtagctgcctaatattttcgtatcggctacggccaaaacgggaggcgtatccaaaatcaccttatcataaactgcggctgcttctgacagaagatctttcatcgcacccgtcgataaaagctccgccggattgggcgggctcggcccgctcgttaaaatatccaagtttgcttcatcagccggcaggacggcattctgaaacggcatctgttttaacagcagcgacgttaatccggttccgttatccaatttgaaggtgaaatgaaccgtcggtttgcgcagatccgcatcaattaaaagcacttttttcccctgctgtgcaaatacgacggcaaggttggccgcggttgtcgattttccttcttccggaccggcggatgtgatcaaaagggacttcacctccgtatcaacggaagaaaattcaatgtttgtgcgaatcgtgcgatattgttctgagttgatggatttcggctcagacatcgcaatcacgcttcgttttccgggtttgtcttttttacgcgtcaacatgtccgcctcccgcttgtttggtttccgccatcctcaagcttttggcaacgctgtctttagtactgattgaagtaaccgttcccaggatcgggatgccgagcagcgcttccagctgttcttccgatttgatcgtattatccagatgttccagcaaaaaggcgagaccgattccgcccaaaagtccggcggcaaacgcaatcgcgatgttcagcttacggttaggctctgccggtgactggctgtccgacacttcggcctttgaaaggatgctgacattatccacgttcatgatggcggtgatcttgtcctgaaaaacggatgcaaccgcatttgccataacggccgcccgcttagcatccgtatcccgaacggcaatcgtcacgacttgtgaatcctgctcgctggataccgtgattttcgattccagctctttcgaagtcatggacagatgcagctgtttaatcacctcatcgaggatgaccgggcttttgatgatgacattatacgtgttgattaattggaggttggtttgaacgtcattgaattggacttctttttgattgtttttggattggctgaccaaaatttgagttgagttttcatagaccggcgtaagagcgaagaaactgatgagaccgcctgcggaagatgccgccgcggtaataataagtataaacagcagacgctttctcagtattgcgaatatttcctttatgcttgcagattctcccatataacctccatatcactttccgtgtattcccattccctccaatgatcttttccaattacgattatacagctttaaactgtcatttctaaccttttcaaatgacaaaattcgacaaaaatagacaatcacttcaatctgtattatatttgtaagcgctttaaatactggtgtcacaggaagattaaaaaatcccgcggccaggaggctgcgggattttatgttgcatatccatttttaatataagaaatcaaattctcaagcatttcttttgtggtcatctcagaggactgctcaccgatgtcgtgcgcatgcattaaaatcttcagaaactcctcttgatctaacttcgttttcttcatcattcgtttcctttcggcttccattaaattgaaaacaagattattatatgctgtcgggtgctgttttgcaatctctaatacatcattcgacacattcgggtttttatgtccttttttaggaaaaactttttccgggccatgtgttgcgatataatagaggaattggaatctttttattttgtgactcgttaggagcgataatcatgcttcaggatatgattgctaaagaagatgtgctcgcagcggctgaacagcttaaagaacttcttccttacaatgaagacaatgttcagctgatgaagaaagcactcattttatatcggcaggattccgtctatcgtatacaggttcaaaccccgacagagatttccgcatatgtgcaggatgttgtgcctgtaagggtcacgctgaacttatttttcatggtgaaaagcggctgcgcatgcccgtctgaggcgatctgccgccacgtgctcgccgtttttctttacgtatatgcccaattcgagcgggtcggtacctttaccgaacattggctggaaagagaaaagcttgaggaaagcagggagcttgtccgccggcagtttcaggaaaaagtgctgccgaatgaagagtcgctgtcaagctggctcgctttttttgattcggaattctcgctgtgggaggcgcggacgccggccggaagccagacgatgcagggcctttattacggctatctgtcagcgctcaaaaaacacgccccgaaaaaacccgagcttaaaagcttatatcagattcattcggcgcttgccgtctggcttcacatgttcactttgattgagtcaggcagattggatgccgaaaaagattattacagcattaatccatacgtggaacagctgatggatacgatttattcctccattgacagactgaaaacgtacgccttgtctttttcactcgatccttttttagaccggacgcccccggtgctccgcagactgcttgtgaaagaagagctttttcaatacgaacgcctccgggtattcggtgaaatgtggagcgcgcttttgaaccggccgaaatgggtcgcgcgtgaacaagagattctcgaacaggaaagcgggcgccgtttttcgccggaagtgcggttcggacggcttcatctggcctttttgcaaaaagatgatgaagcggtctttgaagatatgtcccgcttccctcctgaagcgctgccgtacacttttcaatggctcggtgaactcaccgcgaaaaaagactggaaacggctgaaaacatggtatggccggatcgaaccgcttgccgtgaactatacgaagcttgataagccgtttaaagaaatgcgcgacatcatcggagagctgtttgcgctgttggcggattatgcgcggcactcacgggatgatcagctgtttgaacggtttgcttccggctgccttccctatacctttaccgaatacagccagtacctgtacgaaaaacggcggtacgcggaatgggtggagattcacagcctcgtcggtttttccgtctgggaaattgaaaaggacatcctgaaggaaattgccgccagtgatccggaagcgctcatcccctcctatcaccgggcggcggccttttttatcgaccaaaaaaaccgcagcgcctataaagaggctgcgcgccatctgaaaaaactgcggacgctttataaaaaggcaaaaaaacagcaggtatgggagcgttatatcagccggctgagcgcaagctacaagaggctgcgcgcccttcaagaagaattgcagaaaggaaagttgattgatggcgagtcttaaggaaattttcattcatgtagaacaaatggaagattggacatttacgctgtcaagccatgatgagaaggagcagccgcttactctcagtcagatgaagactcatttgttccaatggcatgagtccaccttttacggaacgtttcttgaagacgtcagcttcatcggcactccggccgttctgctcagcccttggatgaccgtcgagctgcttggaaaaaactcgttcaattcattcagcaccgtgcagctgacaaaggaaacggaaccgttaatcgaagcggcttcgacgatatacgaatttattgccgacggcgattttcttccggattatgacgcatggcaaaatggcctcctgcgcttcaaagaccgcgagcttttgctggaaggctttacggcagactggttctcagccgcggtacaggactacattcagtacaatgatgacctgctggaaaaatggcggcggatcgaaacccgttcgccggccgttcatacgtttaaaggctcctttttggatgaagaggattttctggagggaatcggctggcatgacgatctgacgccgtttaccgtcggcctccgattaaacgagcctgatttcgacggtgacgactggaaaatcgagatgtttttacgtgagaaaaaaaccggctccatcacctttttcgacggactgaaagggctgaaaaaagcgtggcaggcatacagcggaaaaatcgcgcgtgaacaggaccgcttccgcagaacggttccctggctttcgtttgattcaggaacgacgctgatatctgaagaagaggcttggatcttcttatcggaagcgagtgagacgcttgtcgatatgggtgtggagattcttctcccatcatggtggcagattgtccgggacagcaatatgatgcttaaggcgaaagtgtcatcctccccgcggggcgagtccttcgtcggcatgaacgctctgcttgatttcaactggagattcgccacgaacgggattgagctgacagaggatgaattcaatgagcttgtcgcaaacaacagacgtctcgtcaacatccgcggccaatgggtgaaaattgatccgcaatttattaaacagatgaaaatactgatggaaaaagcggaatctgagggcctccacatgtccgacgtgctggcgcgcgaactgatggatcacggggaaaacggagccgaggacacggacatcattgactcatcggcatttgccgggatcaagatcgaattatcaaagcatctcagaagcctgatccgcaaactgacggatgccggggatctgccggagcatgaagtcagcgccgcgtttcagggccagctccgcccttatcagatgtacggcatgaactggcttctgtttttacgggaaaacggcttcggcgcctgtctcgcagatgacatgggacttggaaagacgattcagatgatcgcttattttctccatgtgaaggaaagcggccggcaaaaagcgcctgccttaatcattgcgccgacatcggtgctcggcaactggcagcgtgagctccagaccttcgcgccgcagctgaaggccgtgcttcattacggcccccgcaggccgaagggggaagcatttgtcccggcctatcaggacgcggatgtcgttcttacttcttacggcctctcgcacgccgatcaggaagagctttcttccgtgacatggagcaccgtctgccttgatgaagcgcaaaacattaaaaacgcgcatacgaagcagtcccgcgcaatcagaaagctgaaaggcgtccatcatatcgcgctgagcggaacaccgatggaaaaccgcctgacagagctttggtcgatctttgattttatgaacaaaggctatctcggcagtctgaccggctttcataaacgctatgtgctgccgattgaaaaagaccgtgacgaaaaaagaatcaaccagcttcagcagttaatccggccgtttttactgcgccggacaaaacgggatgaagaagtggcgcttaatcttcctgacaagctggaacaaaaagagtttatcccgctctcagccgaacaggcatccctttatgaacagcttgtcaaagatacatttgaacatatggcttctctgaccgggatgcagcggaaagcgctgattctgagcatgctcggccgcttgaagcaaatatgcgaccatcctgcgctctatttgaaggaagaacagacagagctgttaaacgggagatccgtcaaactggaaaagctgcttgacttaatggcggcgatccgcggacaaggggaaagctgcctcattttcacacaatacattcagatgggcaacatgatgaagcgcctcctggaaaaaacattcggagaaccggttcagtttttaaacggaagcctgtccaagcaggaacgcgattccctcgtcgaacggttccagaagaaagaatacccgacgctgattttgtcactgaaagcgggcggaaccggcctgaatctgacggctgccaatcatgtcattcactatgacaggtggtggaatccggcggtggaaaaccaggcgaccgaccgcgcctaccgaatcggccaggaacggttcgtccacgttcacaaactcattacgacgggaacgattgaagaaaaaattgatgccatgctcgaaacgaaacaaactttgaacgatcagattatccaaagtgaaaattggattaccgagctgtcatccgatgagcttgaagaattattcaccctcagcgcatcgacgcaatcacattaaacgcaaaaagaccggctctctcggaagagccggtcttttatgtcgtccttactgttacgccgcatttgccatgaatgcgtcacgccagtcatgaacagtatcgccatacctttcacagtaaattcctgatcatatacgcaacgccgttttgatcatttgtcaatgtaacggcatcagcgatctctttaatatcttctctcgcattccccatcgctatgccttttccggccgcctgaagcattgaatagtcatttaagctgtcaccgaccgcggcggtttcagccatcggaatgccgagcttttgcgccagccgtttgagcgcctgcccttttgaggcgtttcgagacgccacttcaaagttgtgatcggcagagctgacaagggtgagatctttctgaccgctgaatcggtcccagcccgctttcagcttccgctcatcaaacgaaaatccgagaatattataaaaatccagatgctcttctttctcaaagagctcacggtatgaatgaatgtaagcaaagccggactggctgtattgcactgaagccgcctgttccaaaacggaaagatcggtttccggattggcgcttttcacccggtccatttcgatatcgagcagctgcctgccggtttcaggcgtatagatggctttgtttgtaaacacctcataataatattgattctcttcaagccatgacaaaatcccccgggctcttgtttcttcaatcgcttcacaatggtacaggctgccgtcaggagcgtggatggcggctccgtttgcgctgataatccatgtttttatgccgagcggttcaaatatggagtgcacatcaaaatgcgcgcgtccagtggaaaccacgatttcaattcccgcttgccgggcttcccttaaagcccgcttgttttcatcacttacttgatgactgctgttcagcagtgtgccgtccagatctatggcaatcagtttcacatgtcctcatcctcttcttcagattcagttacaagcaattctacgccgtgccggtcgagcagatcgcaaaaatcctgatcaggcagccgatcggtaatcagcaggtcaacctcgtgcaggtctgcatactgataaaaactcgtacggccaagcttcgagtgatcgctcagcgcaatcacctgttcagcctgacggatcattttacgctttaccatgccgtcttcttcatgcggaatcgtcaggccgttttccgagatgccgacaacgccgatcagcaccttatcagcgtgataatcccccagtttttctacaacggaagccccgtataaaaaccggtgttccttctggagctttccgccgagcaggtgaatatcaattccctcttttgcggaaaggatatcggcctgattgatcgaatttgtaataacagtgcagccggtgacatttaaatgctccgcgcaggcctgaacggttgtcgatgtgtccaggatgatccggtctcctttatgaatcagggatgcggccagcttgccgattttgtttttctcttcagaaacggttttcagccggcccgaatagcccggaacttcctgattcactgacggcagaatcgcgccgccccgtgttctgataatggcccctcgctctttcagctttacaaggtcccttcttgcggtatctcttgaaatatgaagcagcgaacatatctgttcagcggtgatccgccggtgctgtttcaaatattccattatcgcaatcagtctttcttcttgatacacgtcctcattccctttttttcgtcacttatctgtaagtaattataagtttttatcccaatatattcaatgtttttaagtatttataagcgaaatcacttctttttaaccatttttcagctcccgcacaaaaaaaccagtctttcgactggcgaatgggaaggaggtattgcggggcccgctgaaaggcgggaaatcgaggaaaaaagcatgctattcagccagcggctctttccgtttttgatccataaaccgaacggtatcagccatgacctcggtcacataaacttttacgccgtctgtcttttcatagcttctcgtctggattctgccgcttacaccgaccattgaccctttttggcagtacaatgccgtgttttcagcgtttttcctccagatggtgcagttgacaaagtcggttccggtttcacccgacgcgcttttaaaattgcggtttaccgccaacgtaatatgagcgacgggaatgcccgctgatgtaaaacggagctccgggtctttcgtcagccggccgacaagcataacgtggttaaacaagccgtctcctcctctctttttcgaggctggcttcattgtagtataaaggcttatgaaagcaaaaagcggaaaaagcctttatccgtttgggctgcttttatgtttttgtttttctttctgataaaaaaaacttttgtttttgaccgcttatgtaatatgtatttttgagcagccgcgagaaaagtttcgttttgagccagtctttctcaaacatgcggacaaactttccgccgtcccatgcgaaccagtaaaaactcagctttttatcagtcaatgaaagctgaattttatactgttccatgcggtcttttgtttcatataaaaagacgacatttccccttctgttaagatgcacctcacaatcttcctttttgcataccaagtaggaatgatcgtcttttcgccttgaaccgtcttctatatagatttccttcaggcgcaattgattcataagcatctctccatgaccatattcttttacattataatgaaaaaatagaaatgattaaatgttgaccgcctacaaaaatgatgaagcatgtcttacagcattttcccgggaaaaatgatatgtgttataataaatgaacgaaaaacatggacaacaggggtgaaaataagagatgaaaacctttaaactggttgatctgaatgtggaacgtttagataaagacgatcagccgattgaacagtttccccttttagacggattgattatcaacaaagaggacggagaaaaccactggttaattgaagcactggtcccggccgaacacttttctttttttgacatgctgatgaaaagccagaaagaagcgaaggtgtttgtaacgattacgaaaaaaagcaaccgccccgcccagctgacgggaagcatcaaaaatattgtggagctggaaaagagtatacaagttttaatttacggtcaaatggtgtcaagaaaccaccccggatcagaaagcattctggagtcgctcgtgaaagaaggctactcgggcagccggctgattgaagcgtttaaacaaaaattataatcataaaaaaggccggacgttaatcatccagcctttttttgtgccttagtcattgtgaggagcccgctgtttcagcagatctctgatttcagtcagcagttctgtctgctgatctgtttcttctgcttcttcagcctcttcttctgcttcttttttacgtctcagcttgcctattgtacggatcacgataaagatagaaaatgaaataatgaagaagttcacaatcgtttgaatgaagcttccgtacttgatatgagcatcgccgaatgtcacggccagccctgaaaagtcaagaccgccaagaagcaggccgacaagcggcatgatgatgtcttcaacgagcgacgtcacaattttgccgaaagcgccgccgatgacgacaccgattgccagatccatgatattgccccgcatcgcaaagcttttaaattctgaccacattacattcacccctttctatacaaaatgggcttttttataagcccattcgtttgtttttattctccgagcgcaaatgttaattcagcttcacacacgagctcgccgtcaactttggcaacgcctttgccgcgtccgatcgtaccgcgcgcgcgggtaatatcaacctcaagctccagcttgtcacccggttttacctgctttttgaaacggcagttatcaatccccgcaaaaaatgcgagtctgccccggttttcttctttaatcagcatcgcaaccgctccgacctgcgccaaagcctctacgattaagacgcccggcataacagggtattcaggaaaatggccgttgaaaaaatcttcattcgccgtcacatttttatatcccgccgcccgttttccttcttcgacttccgtaattctgtctaccagaagaaacggatagcgatggggaataatttctttaatttgctgagtatcaagcattttcttgacatctccttcatcgacaatagtatgtatagaaggtatatgcgctaaccaatctgtacatttggaagtatattatgaatcaatttctttttcaaccgcgctgtaaactgtaaccagctggcaatgagcctcgtccattaatgtgttatgataaataaagatttttaccctatgcaaagaggttggaagatgattgctaagtttactgaaaaacgtacgctggtgatgctgaatgagtggtatgacgccatgggaaaacgccaattcgatctagcccgttcccttcacgaacaaatcaatcagcatctccccaaattacaaaagaatgcaaagctcaaactcagatatcagctgtttttcgcacggtttcagctgctgtttgagaaaaaagacggtctgactaaattgttctgcgagctgaagcggcgcaaagatgagatggaccatgaattaacttattatttctattttttcaaagggttattccatatggtgaatggcgctccgaaccgtgctgtctgccgctttaaagaagctgaacagtacctgccggccattcaggaccgtttcgaagccgctgaattttattataaaacagcgggtgcatattacatgatgaagtcgcctgcgctctccattcaatatgtcaataaagcgctggaaatctatcaaggtgaattcggttacatcaaaaaaacgctcagctgccgtctgcttctcgccgtgaattacatagacgaggcacgctatgaagacgcagaacagctctttaatgaatccataaagataacggaccggatcaatgacaataacctgctgtgccacgcctattataattttggttttttaaagaccgcccagaaaaaagataaagaggccctccctttttacaaaaaggtattgggcaatcagcgtttcgagaaagagtctcccgtttcctacctgcattgtgtatacgaagcggtcagagcactttttaaaaccggatatgccgccgaaggacaaaccgtgctgcagaaaggtttatacatatctgaaaaagtgcagaacaagataatgaaattgaagctgaccgcgctcaacatactgtacaccgctcaggaggacccgtacgaccgattgcagaaactcgtgctggagctgcagaaaattgaagcgtgggtggatttggaagtgctgcttcaggatattactgattactacaaaaaaaagggcgattttgagaaagccgcattttttatcatgcgcggctgatcaaaacgccccttcttttatctgactgagttgattaagcccagcatttggtctcccaatgtaatcgtgcggctgttcagctgataggaacgctgagacacgattaggtcggtcatttcttttgacatatcgacatttgaactttcaagcgcgccctgctccatgccgattgcctgccggtttgcgccggtaagctcttcaatcgctgatgcccccgctccgtttacggaaaacagattatccccttccgcatgaagggcctgaggattattgacattgacgatgccgagattaaacgtctgcgaacgggttcctgccgggtctgaagcagtcagcgttccggttttgctgattttcagctgattcagcgaactgtcaatttgtatgggctggccgttctcatcgagaatgggattgcctcccgctgtcaacagctgaagcacccggtcatttccgccggccggcttgagggaaagtgagccgtcccttgtatacacccgccgtccgtccgcttctgcctgaagatattgataaggtgaggtgaacgcgatatcaaggtcacggtcggtttttttgatgcctccctgccctgagtccagctgcggagtcatgaccgttccggcgccgagacgcaggccgggcggcgttttccgcatgttcggcgaattttcctttttgtcatctatatggtcatactgctgtctgatcagctcggaaaagcgggagtccctcgctttatagcctgtcgtatcactgtttgaaaggttgctgctgactgtatccatctgctgctgaagctgatttaaggctgttgaagccgtcagcattgatctgagcatcataattgaacgtcccccattttgttacactttgccgatttcatttgcggctttatccatgcttttatcgtaagcctgaatgactttctgattggcttcaaatgatctgtatgcttccgtcatttctgtatacgtgctcgtcacgtccacattcgaaagctccgagacgccttgctttaatgaatacgagacctggggattcgccgccgcgctcggcagttcagtgccgtcggccgtgctgtataggtcattgccgtcccgtttcagattgcgcacgtcttcttccatcctgatgtcaatctgccccgccggccggccgtttgtcgtgaccgttccgttttctgatacggtgaatttttcattgtcgactgtaatcggctgtccgtttgttgataaaacaaggtttccgtttatggtaagctgattgttttcatttaatgagaaagtgctgctttttgaatagcggacgccgcccgcagtctgcacgggataaaacagctcggcgttttcattcgtttcggcattcttgggaacctgattctccataagcgcgatatccgtcggctgatcggtcgttttcaggcttccctgcgtaaacaacggtttcagctcctgcatgtatacgcctgtgttgacggaaccgattttcgtttttttatcgccttctattcggctcagaagcatctcgggaaaggcgcggattgaaccttgatcctctttgtatcctgacgtattcgcgtttgcgatgttatttgacagcatttccgttcttctctgctgtgtaatcattgcggacgttgcggtatataatccttttaacaagtcttccacctctgaaatagcattatttccagttgcctcaccggaacatttgttctataatgaaaatcagcattttttcttattatcggatttacattcccgttcgtgaagggtttgacagaaaaaaaccccattctttttcagaatgaggttttatcatcagctcagtttgcgtttcggaagcttgtccatgttatccagcatgacgccggttccgaccgcaacacaatccatcgggttctcagcgacaagaacaggcaccctcagctcttcggcaagaagctggtcaagcccgtttaacagcgctcccccgccggtaatgataacgccgcggtcgatgatgtcagcggacaattcaggcggtgttctttcaagaacctgcttggcggcctgcacaatgacggcaactgattcacgaagggcttcttccacttctttgctgtttactgtaatcgttctcggcaggccggaaaccatgtcacggccgcggatggtgatttcttcatgacgtgcgtctgggaaaaccgttgcgaccttcaccttaatatcttcagcggtacgttcaccgatcagcagcttatactcgcgtttgatataatttaagatttccatgtcaaacttgtccccagccatcttaatagaagaggaggtgacaatatcgcccatagaaataactgcgatatctgtcgtaccgcctccgatgtcaacaaccatgttaccgctcggctggaagatttccatacccgcgccgatagcggcaactttcggttcttcttcaaggtacacatgctttccgccgcttttttcagctgcttctttaatcgctttctgctcaacggatgtaatattcgtcgggcagcagatcagcatacgcggttttgagaaaagtccttttacattcagcttattaatgaaatgtttcagcatagcttcagttacttcgaagtctgcgattacgccgtctttcagcggacggatcgcaacaatattcccaggtgtacgtccaaccattcgtctggcttcttcaccgacagccagcactttgccgctgtttttatcaagtgccacaacggaaggctcattcagaacaattccttttccttttacatggatcagtacatttgcagtaccgaggtcaattccaatatcccttgcaaacatctatttatatcctccttgatatctgtttcacagtaaaatatccacattgtgccctaattatatatattatcataatttatcaaaaaaaagctgctgatcgatataagttcttgacaaaattttgcggatattcgcgaaaccgcccggaggagaaaaaagggcccggcagacgtcaggcgctacggctgctgaacgggctccccttcaagaatttcatccttcttgtactttaatttcgtcgcctcgccccccttaaatgtctgatggatttatgataatcgagtatttcttttacttcattcgccaagtcaggattgatttcaggcaggcgttctgtcagatctttgtgtacggtacttttggaaacaccaaactctttcgcaatgacacgaacggtttttttcgtctccacgatatacttaccaatcttgattgttcgctctttgatgtaatcgtgcacaccactcgacctccccagttggatgtgagaagtgtgaaatgagatccgtattctgtaacagattcactgatgatgcagcttcttcgttgtccgattatataagaaggttttagaaatatgcccacgatccctcacctcaaacactctctttgataggtttgtaacagtgtattagcaatgaattgggaatatgctaaaaactcaataaggacaaggggcgggtcataattttctgctttttgaacggggggtttacatccgcgcgatcctgctgtagaatgaaacagcacaattagttacttaggtaagttttttgaaaaggagaacggaaatgatccacgtcaacagacgcctcattcatcaaatcaatcaatgcgcccgcctgattacgaagaaagccaatgaacggctggaaccattcggcctgtactcctctcaatggtcaatcctatattgcttaaaaacgatcggaccgatgacccaaaaagaaatctggtcttatctgaacgtagaggcgccgaccgttaccagaacgatcaaacgccttgaagaaaacggctggattcagcgggaacagggagaagacaagcgggaaaagctcgtcgtcctgacgaaggaagctgaattgaaatacaacagcatcaatcaagagatgctgaagttcgaggaagacatgcttgcggatttccaagatggagataaggaagctttttctgagtttctgaatgtgtttttaacgaaataataaagaaagggaagtgctgtacttttgagtaaatctgactcgatctggaccaaagattttattatggtcgtactcgtaaatttatttgtctttgtgttcttttatacatttttggccgtgctgcctatctatatgattcaggagcttggcggcagtgaatcgcaaggagggcttttgatcagcctgttcctgttatctgctattatcacccgtcctttttcaggggcgattattgaacggttcggtaagaaaagaatgacgattgtatctctggcgctgttcgccctgtcttcttatctgtatttgccgatacacaatttctatctgctgctcggactgcgttttttccaaggcatctggttcagcattttaacgacggtcacaggcgcaattgccgctgaccttattcccgccaagcggcgcggcgaggggctcggttattttgcgatgtctatgaaccttgccatggcgatcggtccgtttctcggactgagccttgtgaaagtcatatcgttcccggtgttctttacgctttttgctgtatttgtttctttaggcttgctgattgcttttatgattcgtgtgccggatcaaaacaacagcggaacgactgtgttccgtttttctttctccgacatgtttgaaaaaggcgcgcttaaaatcgcgattgtcgggttgtccatttctttctgttattcaagtgtgacttcatatttatccgtttatgcaaagacgatccacctgttggatgtcagcggctatttcttcgtctgtttcgccgtgacgatgatggccgcccgtcctttcacaggaaagctgtttgacagagtggggccgggaatcgtcatctatccgtcgattatcgtgttctccgcggggctttgcatgctggcgatgacaaacagcgccctcatgcttctcttgtccggtgccgtaatcggtctcggatacggctctatcgtaccgtgtatgcagacgctggcgattcagaattcgcccggacaccgttcaggctttgcgacggcgaccttcttcactttctttgacagcgggattgccggcgggtcatatgtattcggcctcttcgtcgcttcggccggattccattcgatttatctggcagcggggctgttcgtcctgattgctttgctcctgtatggctggagccagaaaaaaagaacgccgcttgaagcggacggaaacgtttcaatcgcagactgatatgacaaaaagccgggggcagcccccggctttttttattcggccgctctttcccgcacgattcgtccctccgcttttgcataaggaggatgaatgtacataagcgccgtataaccgagacatgacaaaatgacacccgcaaaccaggagatatcatagatgccggcgaacgccgggacgtacatcccgattaaagaaataaacgcgccgagaaacgtcgcggcaaaggcccggtaattatagcctttgtaataagtgtactgtccggtttctgaataaaggtcttcaactgagagctgcctttttctgatgataaaataatcagccatcatcaccccggccaccggtccgagcatcccgccgatgagtccgagaaacgcatatacattcgtggcgctctccatcagcttccacggtattgtgaacagagccaaaacggcggtcaaataccctccccttctgaatgtaatatacttcggcaggacattcgccaagtcataggccggtgacacgatgtttgccgccacgttaaccgagacggcggcgatgcaaagtgtgatgaccgaaagagcgataacgaaaggattatcaaaccgggccaaaatctccaccacatcccagatcggttctccgaatgctacctgtgatccggatgtcaccgtgatgcttgcaaacgcaaacagcgcaaacgttcccggcagcccgtaaaactggccgcgaatctgttctttttgcgacgcggcgaaccgggtgaagtcagggatattcagaatcagcgtcgcccatattccgataatgcccgtcactccggcggcaaacggccaaaacgtttcagaaaatgtatggaactttcccggctgtgagtaaatcggaccgagcccgccggcaatatctatcgcccaccagaccatgccgccgaagacgagataaacaagcgggcccgcccacacttcaaattttttgatcgattccatgccgtgccgcagcacaagcagatgaatgccccaaaagaaaatgaacgacagaaagcccggcagatgaagcccgaatatattccaatctccgccgagactcccccagcccggccatatgttcaaaagcagaatgtgtaaggcagtgctcccggcaaatgtttgaattccgagccacatgatggctgtaaatgccctgagaagcgccggaatgttagctccgtatattccgtaagaagccctgataatgaccggaaaaggcaggccgtatttcgttccggcatggccgttcaaggccaaagcggcgaacaaaatcagtgacgccgtcacgataatggcgagcacctgccacggagaaaggccgatcgcaatgagcccgcccacagtcgcgtaggtcgggatattatgaatacaacccatccagatggatgcaaaattcaccgccttccatgtccgttcgccgtcttctaaaggcagtaaatctttgttgcttagccgatcactcgttatttttgtcattttctccctcctgcatgtacgttttccttacatcacatgtgaaaaaatataactgaaaattccgcaaataacattggtcgctgtcgacaataatcgttttgatttttgagcacattacacaaaaaaagagacggggagagcccgtctcttttttttgcgcctgttaagaggcttttttgaggagaaccgaaaaccggaacgccatcaaaaggcttacggcgccgacaacgataagaatcgtgccgagcatatgaaaatggccggcggtaatttcttttccgaaaagaatgcccaaaatgacagaagacaaaatcgaaccgagatacctgcaggtctgaaacaggccggacgttgttccgaccatgtcggcggggctcgttttcagcatggccgcctgaaacgtgacatttccgaaaccgtagccgacacccagcacggacaggatcagcccttttcctatcatgggcgcctgaaggaagaaaaacgttaacagcaccgctccgatcgcggtcaggcaggttccggcaacaatcggctgaagaagccctttcttatctatccattttccggtcaaaggcgacaccagaatactcatgcccgacataaacagcataatcaatccgcttgtctgaacggacaaatgcatttcatcctgaaaatagctcggaagcccgaaaaagatgcagtaaaagaatatattcagcaaaataaattgaatatacaccgacgatagtttccgatgcgttttaaacagcctgacatcaataaacggcttctctgttttcagctcacgccagataaacagcccgacaaataaaagcccgaatacgccttctgtatagtgaggcttcgtactgaaggacaataaaaacgacaggagaaggataatcgctccggcaaacaggagtatcccgattgtatcaagctggcggagcacgcctttcaagccgccgatctcgcgtttttcatctttcggaaacatatacattccgagaaaaaaactgaggatgataaacggcagattgacgaaaaagatcgccggccaccctccccaaacgatcagaaaaccgccgagagtcggaccgagcgccgtcatggctgatgcaaagattgacaggacggccagcgccgaagcctgcttctcctgtatatttgaacggatcaatccgacgccggacggatatatcgcgctgcttccgatcgattgaaaaagccgcatgatcagcaatgtcataaaagtcggcgcaaacggcgcgccgaccgccgagacggcaacaagcagaagcccgatcaaaaacagcttcttcctgccgagcatatcaccgagcttcccggtaacaggctgcgccaccgcgctggcaagataaaaggacgatatcagccaggacaccgttgtaaacgacaggtgaaattcatgctgaatactgtgaagcgcaagagaaatcatcgacgagttcaatgggttcagcatcgtccccgaagccacggccgtcaagaacaggacgcggctttttttggagattgtcattttgtctgtgcgataaattcttccgtcgtccggcttctgccgattttcgggaagataaatttgagtgtcgcttcgtgctgttcatcgctgaatgtcgccatcgcgtcagttacgaaaacttgctgatacccgagctgaaaagcttcccgcgccgtgctttccacaccgatgtttgtcgcaatcccgcataacacaatcgtgtcgattccccgtcttctgagctgaaggtccaggtccgtgccgaaaaacgcgccccactgccgttttgttaccgtataatcgttttctttcactccgatttcaggcacaaattcagcccaatccgccggcggagccgaatggcccgccgcctcttcatccgtcagcggcttcagcgcatccgctccgtcatgaaaatctacgttcacaaagctgataaatccgcctttttcccggaacacatcaattaattttttcgcgttcggcacaacggtaccgcttttatccatcggcacaatgcctttttgtaaatcaataaggaccaaagccgttttttcaaattgcagattcaatgatgttgtcataataattcctcctgatgcagttagtgtttctcaccccgtttattttactctttcccggacaggatttcttccgccatgctccagcgctctttttatggatataaagtcgcatgacacccctttgaaaaagcgacattatgaacgcaaaaaaacatgtcagataaccttacacgaaaatgttttatcgttcttttttctctataataatgaattaatcacgattacattttgaatgagacggaggaatacaacatgcagatgggcgatacagtatttatgttcttttgcgctttactcgtgtggctgatgacccccgggctggctttgttttacggcggaatggtaaaaagcaaaaacgtgctcagcacggcgatgcacagtttttcttccctcgccatcgtatccgtcgtttgggttttgtacggatattcacttgcttttgcccccgggaatacatggcttggcgggattgaatgggccggactgaagggggtcggctttgaacccggaagttatagtgatacgatcccgcattcattattcatgatgttccaaatgacgtttgccgtactgacgacggccattatttccggagcatttgctgaacgcatgagattcagtgcttttcttgtattttcctttttgtgggcttccctcgtatatacgcccgttgcgcactgggtatggggcggcggctggatcggccaaatgggcgctcttgacttcgcaggcggaaacgtcgtccacatttcttccggggtcgccgggctcgtgctggcgattgtgctcgggaaacgcaaggacggcacggcggcttcgcctcacaacttaatttacacgttcttgggcggggcgctcatttggttcggatggttcggcttcaatgtcggcagcgccctcacgcttgacagtatcgcgatgtttgccctcattaacacaaacaccgcggctgcggccggaattatcggctggattttaatcgaatggatgctgaacaaaaaaccgaccatgctgggtgctgtatcaggcgctattgccgggcttgtcgccattacgccggctgccgggttcgttacgccgttctcttccatcgtaatcggtttcatcggcgggcttgtctgcttctggggcgtgtattggctcaaaaagactttcggatacgatgatgcgcttgacgctttcggcctgcatggaatcggcgggacatggggcggcatcgcgaccggtttattcgccaccacttccgtcaatgacggcggggcaaacggactgttttacggcgatccgggactgctctggaagcagattgcggccattgcggcaacctatgtatttgtatttattgtcactttcgttatcattaaaattgtaggtctgttcattcccctccgcgccagcgaagaagaagagtcacttgggcttgatttaacgatgcacggggaaaaagcatatcaggacttataaagtgaggagtggcttagatgagcggtcaaatgttcaaggtagaaatcgttacgcgtccggctaagtttgaaacattgaaacaggaactcggtaaaatcggagtcacatcgctgaccttctccaacgtacacggctgcggccttcaaaaagctcacaccgaactgtaccgcggagtcaaaattgaaagcaatgtatatgaacggctgaaagtggaaatcgttgtcagcaaggtcccgttgatcaagtggtggaaacggcgaaaaaagtgctgaaaacgggagagcccggcgacggcaaaatattcgtctatgaaatcggaaacacgattaatatccgcaccggagaagaaggaccaggagctttataaacagacagaacgcccggagacagcatgtcccgggcgtttttttcgggcttcattaaaaagaagaagcctttttttcatgcggggcaggacgcttatgccgtacggtttgttttttcgcatatgtactgatattgaccagtatgccgcacaaaaacagcgtcataatcaatgaagaaccgccatagctgataaacggaagcggcacacccgtaaccgggaggagtccgctcatcgctcccaaattcaagacaacctgaaacattaattgaaacgtaattccgatggcaagaagcttcccgaacgggtcatcagcccgcacggccgtttttacgccgagaagcattaacgcaaaatataatcccaaaacgatcagaacaccgaatatccccagctcttcactgatcacggccataatgaaatcggtatgcgcctcaggcagatagttcattttttcaacactgtttccaagccctcttccgaaaaacccgcctccggaaatagcaaaataggattgaatcagctgatagccgtccccgttcgcgtcaccaaacggattggtaaaggaaacgaggcgcttcacacgataggatgcagaaaatgcgagataaacaacccccgacaccgccgtcgcgccgagcacgaaaagatggcgctttttcaagccggcacataataaaatcgacccgcacgccgccaggattaaggaagccgtccctaaatcaggctccgccaaagtgagcagaaaagcggtccccaaaattactaaaggcggcagaacccctttcacaaattgatgaatgtacggctgctttttcgtataaaccgaagcgaaatacaaaatcatggcgatcttcgccaattcagacggctgtacgacaagcgggcccgctcccagccacctgcgggaaaaattccgctccagcccgattcccggtatcaatacgagcagcagcaataccagcgaaccgaccacaaacagcggtacaagccgcgcataccgcttatacggcagacaggcggcaaatagaaataagcataatccgatcagtaaagaggcactttgtttatggaagaaataggatggatctccgtaccgctgagaccccatcacatcactggcgctgtacaccattaacaagccgaatccgcaaagcagcataatgacaaacacaagcggcagatcggcgtttttcaaacgtttcagcaacggacaaaactccttcggctattcttttcccgcatacttgacgcacagtaatacagtcacgtttcattctgtttacttttttatgattatttttaataccaattgtgtctcatagaaaaaagcattacactgttcatataaaataaagataaaaggtgatatttgtgaattacgaactatttaaagcgatcaatggtttgtcgcaccatagtgccattctcgactctatcatggtttttataacggaatacgccatttacgcctacgcccttttcctgcttgccatgtggctgttcggaagcacaaaaggcagacaaaacgccctgtacgcgggcttcacgggtgttgcggcgcttatcatcaactacctcatcacgaaagtctatgtcgagccgcgcccctttgtcgagcatacggttcatacgctgatccctcatgccgcggatgcttcattcccgagtgaccatacgacaggcgctttggcgatttcaattgcgattctgttccgcaacaaaaaactcggctggccgcttgtgattttcggccttttgaccggcttctcaagaatttgggtcggccatcattatccgatcgatgtgctcggaagcattatcgtttccctcattgtcggattcctgctgttcagattttcaaatgtgcttcgtccgattgtcgatctgatcgtgcgaatctatgaaagtatcgttcataaaagcaaatcgacaaaccataatatataaaaaaagccggcgtctgtcacagactgccggtttttgtatgtttggctgtatgctttttcctttgtaaagcccagaatgcggcaatgccgagactgtcaatcagcacatcgcggaggcatccgtttctgccgaaaaagagctggacgatttctgtcaggaaagcggcggccaatgcatacagcaccgccctcttcatgcgcctgcgctccctgaaaaacaaataggcgagcacaaaaaatgaaaacgcgtgcccgagcttttgaatcgccgcttccggtatggcgagctccgccatatcgaacacaaagaaaccggacacatccggatgggacgtgaaacggaaggacaccgtctgcgacacaatcatatcgtgaaagctttcagtcaaagcagaaacgaaaacaaagacgagccacccggccgccagacatttattcattcagcatctccttcgttttctattagtataaaggcacatgcagcaatatgaaaagcgcctatcagagctgatagacgctttgggatcaagattacttgcccgaatctttcattgagccgtcatctttaccatctgtcttgtcttttgtgccgtcttctttgtcacctggtttttcttcggtttcttttttaggcgtcacatcttttttctcggaagactgctgaattgacccttccgtttcttctgtcacagcgtttttctcttcagccgccgctttttcaatagatgttaccggcttgtccataaaattgagcgggttcatcgctacgccgtccttgcggatttcaaagtgcacgtgatttccgctttcttcactgtaaagattttttccggatttaccgatgacctggttctgctttactttgtcgccctggtccacgctgacttcagataaagactgatagacagtagacaggccgtctgagtgttcaatttcaaccacataccccagtaccgggtctttagcagctttaacaaccgtaccgctcagagaagcagaaacatcaaatgattttccgtctttctcagctaagtcaattcctttactgaggctgtacgtgttattatagttaacaagtgctgcttctttctctttttttgcggcatcagattcgtaaaactttttcacaacagaaacattttcagaatgagcagccggcattgcgacgttttccattgacttgcctacttcgacggcatcgtctttgccgctgtcatacgcggagtttccgccgttgttcgtcagattgtccttcacatcattcgaaacggattgataccaaaggacagctgttaaaatgacggccgcactgactaagtagattgcagggaatatccagcgtttgcgaaaaaaccgctgaagttttttgacttgagaagttttcttttcttcctctctcatttgttcatcacctcagcaacattctgaacacttttctgaaaatatatacacatccataaaaaacttttttagaagtagtatgtgcagattgcacttaattatgtaatgaaatgtgaagggagatcccggaatatgaatttaaccctgcgcaaagccgtattggaggatttagatgcggtggtggccatatacaactcgacgattgcctcacgaatggtaacggctgatacggaagaagtgacgcccgcagaccagatggattggtttttgcggcacacggaccggcgcccgctgatggtcgcggaagatgaaaccggcaaagtggcggcctggatcagctttgaaacgttttacggccgtccggcctatgacaaaacggcggagatcagcatctatctgcatcaggattgccgcggcaaaggagcaggaagctttctgctgaaagaagccctggcactcgctccggcaatcggcatccgcagcctgatggcttttatcttcggacataatgtgccgagcattaagctgtttgaaaaattcggttttaccgaatggggcgtattcccgggtatcgccgaaatggacggaaaacgatatgacttgaacattttagggagagaactgtcatgatcaccatcgataaagacaaagacgaaaaccagccgctcaataaaaaagcccgttcccttgccgacatcgccaaatggggaaagatcaccgccgtgtttctgatcatcacaggttctctttccgctctgtcagccattgtgacgctgctcggagccattccgggtgttctgctcatcatttccggcgtcatgctgatgcgctcggcaaaagcggctgccgcccttcaggaagggctagaagaaaacgcggaagaaaatatgcttgcacattatgcgtcatttatcaaaatgcagtttttttacgcggcatccagtgtggtactgggcattctcgcttttattttagtcgtcatcttcgctgtcatcggaattatggcttattacagcactgatacgtatgacacgcctgattcatattactatgagaacgatcctgtgtttgaatgacaaaaagagctgatcgcgcgtcagctcttttttaatacagcatttcttttttccggtcttcttccgttaaaaattcaataaagctcttcatcgcagacggctcctcggcaatcagccgggtgtaggcgcttttccgttcctcggacagaatatcgctttttctgattctgttcagcatataaagccggatcgttttttgcacctgtttccgctgatagccggcttccttaaaaaacgcaagacccagagccgcaaggagggcaaaaatgccggccgatacgagagctcctctcccggaaggggcctgaatcaaaagcgatgccagatgaaacagactaaaagcggcgagcgggaaagcaagaaaacggtaaatgatgctttttttcatcagcggcgcgatggcgatttgtattttctgaatttctttttttatgaatcccggcaattgttccgcatgctccagcttcatgccctctcccctttgctgtcatttttgtcttctttttcatatatgcatattttaccgcacccggaactttctttgaaagaaaactgcattcatctttgattccggctctttattctttcaaaatgtcaatgttataatttgaaatgggaatcagattgctgcacttgtcggaatactaatgggcacagtcttgataaatatgatatagcggggttgcaaagtgagcatttcatttattttattcggattttttttcgttttaaatatacttttggccgtcatcatgattttcaaagaaagacgcgatgccagcgcttcatgggcttggctcttggttcttttttttattcccattttagggtttattttatacctgttattcggccataacctgagacgcaagcacctgtttcaatgggaagaccgtaaaaaaatcggaatagaaaagctgctgaagtttcagctgaaagatctgaagtcgaggcaattccaatttaacaacagggcgactgtggataataaagacctcatctatatgcttgtcatgaacaaccacgcagtctttacagaggataattcggtggagattttaacggacgggcgcgataagttcaaacgcttaatgaaggacatttccaacgcaaaagatcacattcaccttcaatactatatttataaaggtgatgaactgggaaaaaaattgcgcgatgccttagtgaaaaaagcacgggaaggcgtaaaggtcagagtgttatatgatgaactcggttcaagatcactcagaaaaaaattcttcaaaccgctgcgggacgccggcggccatgtggaagtcttttttccttccaggcttcgtccgattaatttgcggctcaattatcggaatcaccgcaagctcgtcatcattgacggcgaaaccggctatgtcggcggctttaacgtcggagatgaatatctcggcctgaatccgaaattcggctactggcgcgatacgcacctcagacttcaaggcacggcggtacacgccattcagacacggtttattctcgattggaaccaagcttcccatcaccatacgctcacttacgttccgaatcattttccggaatgcgagccgaagggcaatgtcgggatgcagattgtcacgagcggaccggattcagaatgggaacaaattaaaaacggctatatcaagatgatctcaacggccaaacggtcgatcctgattcagacgccttactttattcctgactcaagtcttttggatgccctcaggatcgcctgtctgtcaggcattgacgtcaaaatcatgattccgaacaagccggatcacgctttcgtttactgggcgactttatcttacatcggcgatcttttgaaagccggagcctcagtctacatttacgataacggctttattcatgcaaaaacgattgtcgtcgatgatgagacggcttcagtcggtacggcgaatatcgacgtcagaagcttcagacttaattttgaagtcaacgcctttatttatgacgtcaccatcgcgaaaaaactcatttcctcatttaaagaagatctgctcgtctccagaaaatatacgtatgaagaatatcaggagcgttcgctgcggatccgcattaaagaatcgatttcaaggcttctgtcgccgattttgtaattcccgggatgtttctcgggaattttctgatataaaaacggacacagcttgaaaaaacacattttatattcaaaagaatgaccgaatagtgtataaatgaaaagtgagtatttttttgtaaaggagtgccatggtttgaaacctgaatcagtgaatcgttcgcttatttctatttcgaaatggggaaaagcgacaggtattttgtttattattataggcgcgtttgcggcgctttcgggcgcgtttttctttttaatcggagccattcccggcgttctgcagatcattgccggcatttttctgatgcgctcggcaaatgaagcgggacagatggcggcgcagttcaatgaactgacagaggaacatatgctggagaattatgcaaagttcgtgaaaatgcaggggatctatctgatcgtgacggtcggcttgtccgttctcggtatcgttcttttcattgtcctcatgacgctcggcatcgtggacgacgcgtttaataatattgatgccaatacatattaaaaaggaaaatcccggcgcatccgcccgggattttttcttattccgcttctccgacaacggtaaagtttttctgcttcggatttgccaatacggcgaacagcattgacgctgtatgcagatattctttcggcaaaaaagttttttcaaataaaacgtttcctcagagttttaactgaaatcactgagttctgcgaaataaggctatggcggtacaagaccactcatcatacaattttttgggtctttgtaattaaattacaattgttcttaatattcacccatgtattcatgctattatattgaaaggaacgatcaaaagcgttggcgttcgttaaatatttacgagtgctgcctcatgtcaaagtcagaaaaaatagtataggaggtaacatatgtttaagtttaaaaagaaattcttagtgggattaacggcagctttcatgagtatcagcatgttttcggcaaccgcctctgcagctggcacagattactggcaaaattggactgacggggcggaacagtaaacgcagtcaatggctctggcggaaattacagtgttaattggtctaataccgggaatttcgttgttggtaaaggctggactacaggctcgccatttagaacaataaactataatgccggtgtttgggcgccgaacggcaatggatatttgactttatatggctggacgagatcgcccctcatcgaatattatgtggtggattcatggggtacttacagacctaccggaacgtataaaggtaccgtaaagagtgatggaggtacatatgacatatatacaacgacacgttataacgcaccttccattgatggcgataacactacttttacgcagtactggagtgtccgccagtcgaagagaccgaccggaagcaacgctgcaatcactttcagcaatcatgttaacgcatggaagagccatggaatgaatctgggcagtaattgggcttatcaagtcttagcgacagaaggatataaaagcagcggaagttctaatgtaacagtgtggtaacagctcatctctaatgaggggcagctaacgggctgctgatcgttccttgagaaattttataatgattgtgaagaggcgaacggttttggcattaccggaggcaggatattctccatcagtttttttagcgcgtattaaaataagagttccgtctttttttggtaacccgcttacaacagacaccttcacataagccttaagcaaaataaaaatatcccggttaccacctcctttagtttcggaggttttcttcattaaacagatcgcaatcccgcatccaggcttgtctgaatatggagccaaaaccgtgatttcctcattacccattgtaaccatttccgttacacgtctagcggcatgaacccatctctttttaacaaaagagatgattcattacatcataaagggacttgctcgcaagttcattctccattgcccgctgtacgcttccgaacgtctcatcgagcgcgcgctgaatatttttgccgaccggacagtcgggattcggattgtcgtgaaccgcaaaaagctcttccttattctgcaccgccctgtaaacctctaagagggtgatctccgacggatcttttttcaggctggctcccggaacacccgcccgggatgtcagaatacccgcttttttcagctggctgatcgttctccgcactacgacgggattggtgtttacgctgcccgcaatcatgtccgatgacgcccgttcatccgttgagatcagcgataaaatgtgaatggccacagcaagacggctgttaatcatgtttttcaccaccattgtaaccaaaatagttacatttcatttgtttgtcaactactaatatacactaaaacgggcggcaggatgaaatcaagttggcaatagagggtaaacaggccggcgggaaaccggccggagagggattaaaataagaaataacgctgtcctagcggaacatagctgacgggctggcatgccagctcttctccgtcggcgaacacctgataggttttcggatcgacatgtatattcggcatcgcgtcattcagcttcatgtcgagcttactcagcttacggatattccgtacgggagaaatcattttttcaaggccgagcttttccggcacaccgtttgcgataccggcctgggacataaatgtaatagaggtattgcggtttgctttaccgtatgatgcgtacatctgccgcataaacacgggctcaggcgtcggaatggaagcattcggatctcccatctgggcgcgggcaatcatgccgcctttgagcacaagttcaggtttgacgccgaagaaaaccgggtcccatagtacgaggtcggcgagctttcctttttcaacggaaccgacttcatggctcagaccgtgagtgacagccgggttgatcgtgtatttggcgatatagcgtttggcgcgcacattgtcattgctgttttctcccgatagagcgccgcgctgttttttcattttatcggccacctgccatgtccggataatcacttctcccaccctgcccatcgcctgcgagtcagatgacgtcatgctgatcgcgccgatatcgtgcagaatatcctccgccgcaatggtggccgctctgatgcgtgaatgactgaacgccacgtcttcaggcacttttgaatctaaatgatggcagaccatcatcatatcaagatgctcgtccatcgtgttgacggtatatggaatcgtcggcgtcgtagaggacggcaggatattggcgtaagatgcgagtttcataatatccggtgcatggcctccgccggctccctctatgtgatatgtatggataacccggtcgccgatcgcatcaagcgtattttctaaaaagcccgcttcatttatcgtgtctgtgtggatcgccacctgaatgtccgcctcatccgctgcttccatgcaagctttaatggcgcttggcgttgatccccaatcttcatgcagcttcaggccgattgcgcctgcttccacctgctcgatcagcggcgctttatcggatgcatttccttttcctaagaaaccgacattgatcggaaactcctcggccgcttccagcattctcgacatgtaccatacaccggatgtacaagtcgtcgctttacttcccgtcgcaggacctgttccgccgccgagaagcgtagtcacgcctgaagaaagcgcgacttccatctgctgcgggcagataaagtggatatgcgtatccaccccgccggccgttacgattttcccttcgccggaaatgacttctgttccggcaccgataatcatgtgcgggtccaccccatccatcatatcagggttgccgcttttcccgacgccgacaatccggccgtccttcaccccgatatccgccttgacgattccggtataatccaggatgacggcgtttgtaatgaccagatcaagcgctccgtctttcccggtgatacgcccgttctgccccatgccgtcccggattgttttccctccgccgaaaatcatttcttccccgtaattcgtgaaatctttttcgacttcaatccataaatccgtatctccgagtctgactttgtctcccgttgtcggtccgaacagttctgcgtattgctcacgtgacattttcatcggatcgcctcctccatccatccggcttttttaagatttgacagcgtcttctcttttccccgctcatccatatacgtatcggccatgccgttgaggcctctgaccgtttttcgccctccgatttccacgagcgtgacggttttctcttctcccggttcaaaacggacagatgtgcctgacgggatatcaaggcgcatgccgatggctttgtcccgattgaaggaaagggcgccgttggcttcggcaaaatgaaaatgcgatccgacctgcactgaccgtgttccgttattggtgactgacacctccagcgtcttccggccttcgttaatggtgatggtccctttgcgacttgaatcgctcccggcttcatgacttcacctccgctttgatcggctgatgaacggtgacaagcttaaccccgtccgggaacgtcgcttccacctgaatgctgtccagcatttccgcaacgccttccataacgtctttttccgtcaatacattgcggccggattccatcagctcagcaacgctttttccgtctctcgcgccttccatcagataacaggtcaaatatgcggcggcttcgggataattcagcagaacgccgcgcgccttccgctgcttagcgagctctcccgccgtaaaaataagcaatttttcttgttcaaccggtgtcagtttcatctgtattcccccttagtgatagtcaaacacaatccgcatggtcataccgaaacgatgcaggcggccgtcacccccttcacctcatgaaatgttaagtgataaaagttattcgacagtgaacggcccgattccttttgcagaaatgaccgatttctcatttttttcttcaacaaacgtttaattaaatgtgaagaaaggttacattctttgtgaatattataaagaaatcgccggggaatttatagaatatttaaaaatttagtgaatattaaccaaacgaactggaatttttgtcatttctcataacaaaaagcccaaaatattttgggcttttgctgtgtttcacgatcaaattaatcatcactgagtttatctttcgttttaccgacacccttttgcaggctgcctttcgctttgtcttttttcccttccgcttttaagtcggacttgtttgccatgtcgcctgctttgtcctttgcttccccttttattttgttcatgccgccttttactttgtcttttaaaccgttatcttcactcatgatctcttcagctccttttgtttttgtgtacttgttttcttccctttcagcctgatagcaaacatttcaactctcaattattgatttcacagcgttccccgtagcggatcactttgtaaacggccaatccgtctgacagcttattatccccgtattgcacgggcagaagagcaaagaaaacataataagttgaaaaatagacaaattggtaaaaaaataagtttggctctaggaaatcttttatgatcagcagatttattaaaaagatagaagcgagattaaacagacagcctccggaatagacgagcgcgctcgtcagacggttatctatccgcaattcgccgaacttgcagaaagaatctatgaagtagatacgccgaacctgaatcggccctacttttaaaagacgtttccccattccgatatccaacgacgccttgcctccgaacagcatggccataaagctgtgtcccgacacatggatgacagacaccatcgggagaatgatgagaaatgaaacgaaaaactttatcatatcattaaatccgaacaacaaatccctccttcccatcgtacttttttccctcttttgcgatttttccgattttttctatgatcaaacgtcctgatgtgcataaaaaaataaccatctgctgatcagatggttaacaaaaattatatatcgtataaacactgttctttttgaattttttctctcatgcgaatcgctttttcataaaaatacgccgcttctttatattgctcatgtgcgcttgtgtaaacggcggcctccaaggcgaaatcttcaatatacacatacagcgatttttcattcatatagtcaaacacttcatggattaaatccatattgagtgactccaaataaagcgcttgtaaaaacttatacttctctaaactgaatcggtcgccgcgttctttcgcgatcatgatccctctttcataataggtaagggccgcttggtcatcatgcagcctgaaaagggtgtgcgttaagctgaacagcgccttcggaagctgttcaagctgatgctcttcaaaaacgggaaccgcttttctaaagtaccgggccgcttcatccagatcccgcttttcagcataacaattccccagattgtaaagcgaagacccgatcaggcggggctgtccttcaagcaaagaaaggcggagggcttcgtctaaatgctcaagcgctttgtcgtagtttttgcagtcgatgtagtttcctgaaatgacgaaatggcattgaattctccgcactctgtaaaaatcgtgtttcatatacgtatccagcgcctgaatcccgtgattcatggaaaaatgagtctgcttcatgacgtaaaaaacttcagacatcttgaaatggaattccgccctctctatatcatcctcgacaaatgaaaggagtttttccgctttccggtaaaaagaaatagccgcaacatagttattgtgatcgaattcatacatccctctgaacaaatggaaataatactcagacagtcccgatatgctgtccgtgctttcgatcgtcttttgcagctcgctgtactgaatctgtgattgttcggtgcattccggcttgacgtaatcaagcataatatgatggcggtagctgatcagctgataatataacagcagcagctggtcttcctccatacgttgtatatcctcatcaatttcctctttcagctttatggcatcagccgcttgaaacgctaaaatgtgcttgtaccatttgttgatcttgactccaacttgagatgacggaatctcgtatgcggtcatgcccctttcacaaccttttctaatttctattggttatattttaacatattgtatggctttggaattgcataacttgattgtcctgcatcaaaattcctatcatatatttcggctgttaccggtattttttgaacagaccgctctcatattgtgaataaaaaagcctgcccttgtccgggcaagcttttcttcatccgcctatataagacatttccactttctttttcccatccgttttagaaagcgcgcggtcaattgaatactgatccgcgcgatttctccagacagaagcgatggattccgtcaattcatcatcggtcagaccgccgcgcacgagtttccgaacatcatagccgcttgacgcaaacaggcacgtaaacagctcgcctctcgccgacaggcgcgctctgttgcaggaggcgcagaatgcatccgagacggaggaaatcacgccgatttcgccggaaccgtcaagatagcggaacctggaagcgacctctcctttgtaattcgcttctatcggctccgtcggcatgtgctggttgatcagatcaataatttcggccttcgtgatcacgtcttttttattccattgattcgtattgcctacatccataaattcaataaaccggagaatatgacctttttctttaaaatagcgggccatcggcaggatatctttttcattgacgcccttttgaacaaccatattgattttcacaccgagtccggccgcttttgccgcctcaatgccctcaagcaccttgttcaccgaaacgccgcggccgttaatggccttaaaccgctcatcctctaaagaatcgaggctgactgtcactcgatgcagccccgcctgcttcagtttttccgcatacacgggaagcagagagccgtttgtcgtcatcgcgatatctttaagtcctgggatgcgcgcaagttttttgatcaattcaggcatatcttttctcatgagcggctctccgcccgtcagcctgattttttcaacgccgaagcggccgacaaacagcttcgcaagccgctcaagctcctcgaaggagagcaattccgtcttttgtaaaaatggataatccggtccgaataattcggctggcatacagtacgtgcatctgaagttgcagcggtcggttacagagatacgaagatccctgagcggcctttcctttttgtctgtcacccggcgcgtttctgtattcataagcccaagacccctttctattgttcaacccgttcaggatgtgtgtatacgttaaatgatccgtttctgacaaaaccgatcgcggtgatgttcagctcttccgccatttgcagcgcgagctccgtcggcgccgattttgaaatgacaatcgacacgccgatttttgcggcttttaataaaacctctgaggaaatccggccgctgaagacgatcagcttgtcacggacgggcattccgtttttcaaacagcagccgtacagcttatccagcgcgttgtggcgcccgatatccgtcctcatcaagagcagcttttccgtatcgcacagcgctgcattatggacgccgcccgtttcccggaaggtgccgcttccgctttgcatctccttcatcaggcgaaggcacgtctcaggagttatggtaatccggctgacggcggttttggccgttttcacatcctgctgaaagtaaaaatggcggcctttcccgcagcatgaaccgatgaccctcttcgtatagtctttttgctcaagcactccgggattcgtcagttcaacatatgcgaacccgagactttcatctatagtaaagcttttgatctctttttcaaaacgaatgacgccttctgatgcgagaaatccgatgacgagttcctctaaatggtcaggcgtgcagacgagcgtaacaaattcctgcccgttcaccatgacggtaagcggatactctgaaaccatccgatctgccgtctttgttaatacccctttttcatagcggtatatgtctcttaccgctgttgttttttcatccactgttttcccctccgcagtatccttctcttttattcttccacaatccctgtattttgtcgaatttgcggtttaaaaaaagagccctcttcggactctatgtttcattgcgatgatgtctgctcagaatggtgaataaaataactgcggcgataatggccaatatactgacgaatatgaaggcggcaagcttcagaaaaatccctatcagaacaaaaacgactgccgccagcaccaatataatgcctgctccttttaacaacagcgttcatctccttttatccgtatcattcccgcggttccgttttctaaacaaaaaaagacgccgcacgggcgtccttttttaacctattcttttgctaaatcctttgcggcgtcttcccaagcctgtttgaactcgtccgcgctgtcagctgagacgtatgtgccgcctcccgcttccgccgctttttcaaggctttcgcttcctttcatgccgaagttgaagccgatgatattgacgaccgtgttgacattcgctttacggagcttttgaatttcggcttgaggattcccgccgcatgtttcttcaccgtctgtgatcagatatacgacgtttttccctttagcgccggcccgctcaaattcttcacgtgtatcagaaagcgctttcgctatcggtgtccagccggtcggtttaatcttgctgagtgattgctcaaatggagtcacggcgtacggctgaaggccgtataacgtttctgtcgcgttacatgatacggctttgcctgagtttttattattgcccttatgcccgaatacccgaagcatcagattcgtgtcttcaggaagaacttccgcaaaagaagtgacagactctttcgcaacatctattttacgctctccccctgttttttgtatcatgctcccgcttgcgtcaaacagcacggcgacgtttgtttcttcgtgctttttctcagctgcaaaaacaggtgatccgagtgaaagcgtcaaaagtccgacaatccccgcagtgaacatttttttcatttccttcattcctctccgtttgtttttggccgatgggcccccggctcttctctatgctagatgaggagtatgcaaaaagatatagggcgggattccttttgtataagcggctgtacgccgttaaaaatgaacagaattatgcgcatcatcctaaaaagattggataaatgatgacagatttaatgcctttttcgccctttttgtaatataagtccggaatctgattctttttacagttttctcttcatcttttcttgaaatttttgttaaataaaaataaaaaaaagggccgctaaacggcaccttttcttatttcgctaatgaactcgcttccatcgtaaagatgcggttcatatccttttggctgtgagcttcgtaatattttcctccgcccgcaccggcaattgcgtgaagctgtccgttgaagccttctttaaagtcaaagccgatcacgttgactttaatatgatgtttgcgaagttctttcgctgtcttaataggatctccgccgcatgtctcctcaccgtccgtcaacaggtaaacggatttaaagccgaatttatgaacgccgttaaaagaagccttcgcatcttctaatgcttttgcaatcggtgtccagcccgtaggcccgattccgttcagagagttgaggaagctctgtctgtcaaacttttggaatccgtatacaccgcgaatggattcacaagattgaacttttccggagtttttattattgccttccgaaccgaaaaccgtcattctgacctgtgatgtagacttaattcgatctgcaaaacggacgatttcatcttttgccatattgtatttagaaacgccgtcaatccgtttcgccatactgccgctcgcatcaagcagaatggcgatattgtttttaaataaaaatgtcttctcgtttgcattctcggcagcaaaagcaggagatgcagcagtcagcatcaatccgagcatgattatgagtgaaagtgtttttttcattgcttcttccccttttcaatagatttacgttcaacgccgaacaatatttatcgtaaatgagatgaaaagggaaataaataggacggcgttcctcattatttttgcgtatattcacatagatacggcatttttatcagtgattttcacccggcgctcagccttcagacggcatttgtcagcctttaggctttcgttatatgagtctgttggttgctttaccgtttatggaatagttttcaaaaaaaacagacgctcatgaaagcgcctattttttcgccatatatttgtttaaaaatgaatctgcttcggatatgtccactccctgataataatgcttgacgatgtccgccacggatttcccctgctccgccatgtaattggccccgtactggctcatgccgacgccgtggccgaatccttttgtcgtaatggtgatgctgccgccgttccgtttccattcaaagtcggcagaacggagtccgagtttttcccggatgtctcttcccttcagctttttgccgtttatgacggccgtcgccacttgatggcccggcgttctggctgtaatctgccctaccgtgttttgtcccgagagctgtacgccgagcttttgctgaaactccggcacactgaaggtctgggtggcaagatatttcggcgattgcttatcccacggacttttcacgctctttaaataaggaatggcgcttgtccaataggcttccgcattttccgtatacccgttgctcgtagagaagaaagatgcctcaatcggcttgttgtcgtacgttaaaatctttccttgcgtgcctgcgaccgcgtttgtgattttcttgaggttgtgtgcgtacttagaaccccattcttttttcagctggcttttgctttgatagacttggaacatttgcgtatcgtccaccagtgatcctttcggcgcctgaacggctgagtcagcaaccatcaatctgacgatgaatgtccgggcggcgagcgcctgggcttttaaggcttccggtttaaaggttgcgggcatttcggaagccacgacaccgatcacgtactcttcaagcggaatgttctctacagaatgattggatgtccgataaaccggaatggatacaggtgattctttcaatgtttctgctccttttgtttctcgtgtggtgtgtgttgttttgtgtccgggctctctgtttacggctgctcctttttccgcctgaaacggaagaacgagaatggtgggaacaagaagaataagtatacacagcccggatagtagaaatacaatcggtttcatatatcagctgcctcctgcttgggattcgactctacttcatcttatgggcagggacaagctaatatgacttccttttggacagaatcttattccatttttcacgcgaaaaacgtattcttttttgaaaatcagagcataataatgatgataaaccataaaaaaacagtatgccagattgacatactgtttttacagccattatgcgtttaggtcagttacgacttctttgctttcttgttcagcggccgtttcatcaacgacacgctcgatgtcagcgccgagagccgcaagttttttatggaaattcacataaccgcgatccaagtgcttcagttccgtgacgcgtgtatgaccttcagccactaatcccgcaagaatcagcgccgcgcccgcacgcaggtccgtagcggcaacttctgcgccttgcagctgtacaggaccgttaatgatcacagaacgtccttcaattttaatgtcgccattcatccggcggaattcttcagcatgcataaaacggttttcaaacacagtttcagtaatcatgcttgttccgctcgcacggagaagcagcgccatcatttgcgactgcatatcagtcgggaatcctgggtgaggcatcgttttaatgtcgatcggcttcagctgggcaggaccgatgacacgaaggccttctccttcatccgtaattttgactcccatttcttccattttcgcaattaaagacgtaagatgctcaggaaccgcacctttgactaatacatttccttccgtgatagccgcagccaccatgaaagtacccgcttcaatacggtcaggaatgatgttgtgtcttacgccgcgaagcttctcgacaccttcaattttaatggtgcctgtgccggctccgcggatttttccgcccatcgcattgatatagttcgctaagtcaacgatttcaggctcttttgccacgttttcaagcgttgttgttccttcagctaaagcagctgccataatcaagttttctgtcgcacccacacttgggaaatctaaatagatttttgcgccctgcagacggccttccacttctgcttcaataaagccgttgcctactttgatttttgcacccattgcttcaaagccttttaaatgctgatcaatcggtcttgagccgattgcgcaaccgcccggaagcgctactcttgaatgacccgtacgagctaacagagggcccataacaagcactgacgcgcgcattttgcgcacatattcaaaaggtgcttctgtttctaaagcgtaagaagcgtttacggtaacttcattattctcaaaatgcacatctgctcctaaatgacgcaacacttcattaattgtatatacatcggagagcgtaggtacatcacatattacgcttttttcttcacttgctaataaagatgcagcgataactggtaaaacggcattttttgctccttcaactttcactgtgccgtttaacttctgaccgccgcggacgatgattttttccaaggtattcccctccgcgtccctatattctctatattaatattcagttgtcacgattggtgtgccaaccgtaacggtatgttttccgcccattcccgcacttctaagcgcaacttgcacattcatcttatgtttcgatgtcatgatgtaatctgtccacttatatgtaaatgcagaaacagaaacgaaatgaggctcaactacatgttcaactggacttgcttcaaattctttcatgagctgttctgcttttttttgcaaaacaatactcatattatcatttaaatgaccctttagacaagtaaaaataaatactttattttgaaatatgtcatgtgcctgccgttcaaactgttcatatgtatcattccagttttccggttgctccgggctcatttgctcatataataaatacgaagttgggttctggtttttgagggtagtgacgagctgcagtttaaaagttgtgtgattttttttgtcagaatacgtgccgacggcctttacgattttatcttcccgcgcggattcccaatgatattgcggatactgcgtcttcagttcttttaccttgtcatcaaattcactcagtgacaggttcagattttttttcgcatgaagcgtccattcatccacagtgacctgctgccgctccattccttcggcaatctgggcaagcggagacagctcacttgcatgaatggaatgaaataccgctattaaggcgcttaaaaaaacaaaaaacaagatgatacggcctgctctttttttcttcatatcgatctctcccccttactcccatttttgccggagccggggaaagcaatacatggaaaacttcgtcaaaactcgccaagcgggtgaagaaaaattggtttctcacccagcgattcccttcatttcaacagacgaaacatcttaaaataagtatggaagctgtttcgaataggtaagataatctaaaaagaagttggcgactgccgtaccgatcgcaatggtaagaagaatgatcagcagcctcgcctgcactatttttccttttcggatcagcggatcaaagttgacggcctgaagcgcccaccatgtcaccgcaatgcataccaggtgaaccaggatgctgattgcggcctgctgccccaatacattcacaaattccatctcctttcattttttccgcccctcatatcctctcttattatataagaagaagagagaaagatgatcatttttacatcagaatttttatccaaaattaggggcaatccccgcttaaatgtccgttctccggcatgatatacttttttggaaaggagatgggaatatgaatcattccttttttcatccggaaaagcagtatggagaaacacttcccgtatttgaccacgagtgggaagcgatagcattctactatgattatagacagtctcaaacagaggaactgaaagaattatgtcagtttttcaacatttctcttgattattcacccggcagcctgctggcagtggaagctctttacttccgcagcataaaagagctgcttttggcggattggaacctgccgattgacgaatttgagaaaatgctcagtgtgtatgtcatcgattgcgccatcagacatcatgacgatgccgaatgggtcgtcaaaccttatccgtatacggacggcgcttatacgacgggtgtgcggagaggaaacaaaacgtggcacaccgacaactgctgcgaacatttatatctgcaaaaagaagaggatcatccgcttatcggcgtctatgaatctcttatgcgttaatatagaaaaagaatccttctcagacagccgagaaggattcttttttagtttcctgcaacatccaatctgtttacagcccgctgtaacgcaagctcagcccgacgaatgtcagtatcatctgatcgtttgttcaaacggtcttccgcccgctttttcgcagcaagggcgcgctctttatcaatgctttccgctgtttcagcggcttgtgcaaggatagtgacctgatcaggacggacttctaaaaatccgccgctgacagccgccaattcggtctgcccgtcttttttaaggcggacagcgccgattttaagcggagccacggtcggaatatggccaggcaggataccgagatcaccgctctcggctcttacactcaccatttcaatatcagcatcatatactgggccgtcgggagtaacgatattgactttaacggtcttcatgcttttaccctcctaggaccagattaaacttctacacccatctcttttgcattctcaatgacttcttcaatgcgtcccacaagacggaatgcatcttccggaagatggtcatatttaccggaaaggatttctttaaagcctcgtaccgtttctttaacaggcacgtaagaacccttttgtcccgtaaactgctcagctacgtggaagttttgagaaaggaagaactggatacggcgtgcgcggtgaacgacaagcttgtcttcttcacctaattcgtccataccgagaatcgcgataatatcctgaagttctttgtaacgctgaagcgttgactgaacttcacgcgccaccgcataatgctcttctccgacaatttccggagcaagcgcgcgggaagtggaagccagcggatcaaccgcagggtagatacccatttcagttaatttacgctcaaggttagtcgttgcatccaagtgagcgaacgttgtcgccggagccgggtcagtgtagtcatcggcaggcacgtagatcgcctggatagatgtaactgaaccaacgtttgtagacgtaatacgctcttgaagctgacccatttctgtcgcaagcgtcggctgataaccaaccgcagaaggcatacggccgagaagcgcggaaacctctgaacccgcttgtgtgaaacggaaaatgttatcgataaagaacagtacgtcctgtccttgtttatcacggaaatgctcagccattgtaagacccgtcagtgctacacgcatacgtgcgcccggcggctcgttcatctgtccgaagaccatggctgttttcttgataacgcctgaatcgctcatttcgtagaaaaggtcgttcccttcacgagtacgctctcctacaccggcgaatacggaaataccgccgtgctcttgcgcgatgttgttgattaattcctggattaatacggttttacctacgccggcgccgccgaacaatccgattttaccgcccttgatgtaaggagcgagcaggtcaacaaccttaatccccgtttcaagaatttcaacctcagttgaaagctcatcgaatgaaggagctgatctgtggatcgggtccttttgagcatccgcaggcagcggttcatttaaatcaattttatctcccagtacgttaaatacgcgtccgagagtcacatcaccgactggaacggaaatcggcgcacctgtatcaacggcttccattccgcgctgaattccgtccgtagatgccatggcaattgtacggactgtatcatcgcctaaatgaagagcaacctctagcgttaggtcgatgcctacttcattttcgcctgtagctggctgtgaaactttaatcgcattataaatcgcaggcaagtggccgtcctcgaaacgtacgtcgacaaccggtccaagcacctgacttacgcgtcctttcttcatcgctatccctcctgacaaaatctttctattctaaagcggctgcaccgccgacaatttcggtaatttcttgtgtaatcgccgcttgacgcgcgcggttatatgaaagcgaaagtgaatcaatgagttctttcgcattatcagtcgcatttttcattgctgtcattctcgcagcgtgttcacttgctttactgtcaagaagcgcgccgtaaattaagctttccgcatattgaggaagcagcacttcgagcacctcttcttcatccggttcgaactcgtaagaagccgtgcgcttcccgccgctcgttccgaaatccgttaaaggcagcacttttttctccgtcacttcctgtgaaatcgcactgacgaaatggttatacaccaaatgcagttcatcaaaagcgccgtcgataaacatttgaaccgtctgacgggtcaaatctttaatctgagcaaaagtgacctcgtcgccaagccccactaactcagacaaaatcggcatctcccgttttttgaagaaatcgcggccgactctgccgattgcaatcaccgtgtattcatctttagactgatggcgttcttgaatggtgcggtaagcgtttcgcaaaaccgaactgttaaacgcacccgcaagcccgcggtcagacgtaatgacgagatacgccgtctttttcacttctcttgagacaagcatcgggtgtttcgcgtttttcgcgccttttccgacgttaaacacaacctcctggatcttatccatatacggagcaaatgacttcgcgttggtttccgcacggttcagcttcgcagcggataccatctgcatggcttttgtaatctggcttgtttttttcgttgacgtgatccttgacttaatatcgcgtaatgaggccaaagatttcaccacctttattcttcatttgcgtaaaaagagagaaaaagagaacctttttctctcatcttctaagggttagttgcttggtgcaaatgtgcgtttgaagccttcgattgcagctttgaagtcttcatcagcaggaaggtttcctgttttcgcaatgccgtcaagcagatctttatggttttgatcaaggtacatgtagtactcttcttcaaaacgtctgatatccgcaaccggaatatcatcaagatatccttttgtcagcgcataaagaatggctacctgtttttcaaccggaagcggcttattcaagtcttgcttcagcacttcaactgtacgcgcaccgcggttcaatttcgcctgagtcgcctggtcaagatcagatccgaattgggcgaatgcttcaagttcacggtatgaagcaaggtcaagacgcaatgttccagctacctttttcatcgctttgatttgggctgacccgccgacacgggatacggataatccggcattgatcgcaggacgcacgcctgagaagaatagatcggattgaaggaaaatctgtccgtcagtaatggaaatgacgtttgtcgggatataagcggagatatctcctgcttgtgtttcgacgaacggcagcgccgtaattgatcctgcgcctttagcgtcactcagcttggctgcgcgctcaagcagacgggagtgaagatagaatacatccccagggaatgcttcacggcccggcggacggcgaagaagcaatgacagctcacggtaagcggccgcttgtttggataaatcatcatatacgacgagaacgtgcttgccgttgtacatgaattcttcacccattgtcacccctgcatacggtgcaaggtaaagaagcggagccggctgtgaagcggatgccgtcacgacaatcgtgtaatcaagcgcgccgtgcttacgaagtgtttccaccacgccgcgtactgtagattctttttggccgatcgctacgtacacacagatcatgtcttgatctttttggtttaagattgtatcaatcgcaacagatgttttacctgtctgacgatccccgataatcagttcacgctgtccgcggccgatcggaattaacgcgtcgatcgctttgatacccgtttgcagcggctcatgtaccgatttacggtccattacgcctggagcctggctttcgatcggacgtgttttgcttgtcagaatcggacccagtccgtctaccggctgtccgagcgggttgacgatacgtccgattaattcttcacctacaggaacttccatgatgcggcccgttcttttgacctcatcaccttcgcggatatctctgtaaggtcctaagataacgatacctacgttggattcttcaaggttttgagccatacccaaaacgccgtttgaaaactcaacaagttcaccggccatacaattgtcaaggccgtgtacacgcgcaataccgtctccgacttggatgactgtacctacgtcatgaacttcaatttcagattggtaattttgaatttgctgctttatcagcgtgctaatctcttcagctttgatgctcacttaggtttcaccccttctatcgatttcctccggcaagttgacgttccatgcgctcaagctttccgcttacgcttccgtcataaatccggtttccaatgcggactttaatgccgcctattaaatccgtctgcacttcatttctgattctgagcgaagcgattccggctttttttgcaaacacttgagacaatgataacatttccgcttctgaaagcggctttactgaataaacaaccgcgtcctctgtctgacgggcctgattggcaagtttgataaactcgtctgtgagatcaggcacaatcgaagaccggcggcggtcaatcagaagaaaaatcgtatgcagcacagactcagacagtgcgccgaacgattgctgaatcagctcttttttcttagcggccgataccttcggatggcttagcacttcctgtaatccggcttcgtttcggaacacttcttttagtacggtaagctcttcttcgatttcattgatttgagaagtctcaacggcaatgtcgaaaagcgctgacgcgtatcgtttagagacagcagatccactcatcggctttctcctacctctttaagatagtcctgaatcagttgttcctgggcttgttcatcaagctctttttcaatcactttcgatgcgattaagacagaaagtgatgcgacttgctcgcgaagtgcggaaaccgcttgttctttttctttgacaatttcggttctcgccgcttctttcaatctttcagactcggcgcgtgcagcctggataatgtcttccttctgcttttcacccagttttttcgcattttcaatgagtgattgtgattcctgtttcgcttcttttaaaagaacgcgctgctcttcaatcagcttctgcgcttctttatttctttcttcagcggacgtaatttcgccggcgatatgatcttcacgctgtttcattatatttaatagcggtcccagagcgaatttcttgagaagcgctaataaaactaacatagctaacaattggaataggatatctccgccgttaaacgacagtcctaattcaagaggtaattgagacatctactacggcaactcccttctgcaggttttctctgctgataaaaagccgtttcgggacggcctgcttatcagacataaagcaatggcgaaggttctcttagagtgatcttcgccatttttagttcatataaggcttttttgcttagccaaagaacgctaagaacgcgataacgacagcgataatcggaagggcctcaaccaatgcgatacccatgaacataagagttctaagttcttttcctgcttccggctgacgggcgattccctctaccgtacgtgaaacgatcagaccgttaccaatacctgcaccaagtgcacctaaaccgattgcaattgcagctgctattaaattcatgaaaaagttcctcctttaaaatgttatccgaatggatatatgattttaatgatcatgactgattttgtgtgacatgtacaccatcgtcagcatcgtaaagataaatgcctggatggtaccgatgaacaagctgaatgcctgccatgcaagcatcggaataatggctccgactgtgccgaccaaaccgagaaagaaactgtttgagtagaaattcgtcgccagattcgcaagcaggccaagaagaatttccccggcgaaaatgttaccgtaaagacgaagtccgagtgtcagcgtattcgcaaactcctcaatgatcttcatcgggaacataagcggaaccggtctgaggtaatccttagagtattccttcaaacctttcatcttcacgccgtaatagtgcgttaacgacacaaccataacggctagagtcagagtaatagccggatcagccgtcggtgatttccaccaaagctcgtgtccgaccgttacagaaaacggcagccctagcatatttgatacaaatatgtacatcagcaaggttacaccaagcgccaagaagttagcccctgtttttaaatccattgtactgcctataatattgcggacaaaatcaacaatccattccatgaagttctgggcttttcccggacggatggacagcgttcttgtagtaagaatcgcaatcagcagcacaatcacacttgccacagtaatcatcagaatgtttgtcagattaaaagtaagaccaaacaaatcaatagttctgtaatcgtgattcaatgggttttcacctctcttccattgatgaacgtttgagctgaataatggaatctatcataatgacgggataaattgtcattaatccaataatcacacttgccacactgactttatcgggatatttaaaggcgacagccatcgcaagtatcgcattgcaccaacgcgctgcgctcccgagtgatcgtatggactttcctttcgccacggccttgtcaaaagcattcattcttctggtcaagagccacaaattaaacaaactgaaaacagttcccaaaaagaggcctaaaaaaacagttttatacgccgtaagaccatatcccagcaaatagattgctaagattacaaatacatatctccgttgtctgctgaatgtaagattgggatcgtccatcaactatctgtctcctgatgaaaatgtaatataattcctggatacggcaaaacatgcggttaacccttgcagaaggccttttttgtccgcaaaacggcctgttcgaaaaaaccactcatcctcctgatgctacgggatgctgtttcattcgcttagataaatcctcatataacgggtttttttggaggatttaaaatgaggatggatactagaaatgaaaggaatgaaaaccttctcataataccctcgtttagcatacaatagccctaacatgtgtcaatctgtttaaagttaaaaaactttttataccggaagcatacacagaatgttcacaaattcacctataaatgtatgacctctgcccattcagctaaaatctggataaaaaaaagaaaacccctgaatgaggttttccgatttatttggttccgtacagtctgtcacccgcgtcaccgaggcccggaacgatatagcctttttcattcagtttttcatcaagggcggcgatataaatatcaacgtcagaatgatgtttctgcagctcttccacgccttccggagccgctacaagacacataaaacgaatgtttctcgcgccgcgctttttcaggctgttgatcgcttccaccgcagagcctcccgtagcaagcatcggatccacgacaataaattcgcgttcttctacatcagaaggaagcttgacatagtattccaccggttttaaggtttccggatcacggtataatccgacatgtcccactttagcggccgggattaatttcagcatgccgtcaaccattccgagacccgctctcaggatcggcacgataccgagtttcttccctgaaatcactttggatgtcgctgtttgaacaggtgttttcacttccacttctttaagaggaagatcacgtgtaatttcaaacgccatcagtgatgcgacttcatccacaaggtctctgaaatcctttgtgcctgtattttcattccgaatatatgtcagcttatgctggattaaaggatgatcaaatacgtaaacctttcccatactgtgttcagctccttttttgttgtccgagtgactttttcacacttctattgattctacagaaaaagacaaacagtttcaagaaaatcataaaaaaacccgccggattaaggttccggcgggtttcttccttattaatagtccagttctttatataaaggaaacttttcagtcaaggcagatacgcgctgtttcgcttcttcaagttttgcttcgtcttcatgatttttcagcgcgaggccgatgatggcgccgacttcttcaagcgcgtcaccgtcaaagccgcggcttgtcacagccgccgtaccgagacggattccgcttgtgacgaacggtttttccggatcgtaagggatcgcgtttttattagatgtaatgccgatttcatcaagaacgtgttcagcgacttttccggtcagtccgagagaacggaggtcgacaagcacaaggtggttatccgttccgcctgatacgagctgaataccctctttgttcagagactcagccaggcgcttcgcgttcgagatgacgttttgcgcatatgttttgaaatcatcttcaagcacttctccgaaagaaacggcttttgccgcgatgacatgcataagcggtccgccttggattcccgggaaaatggatttatcaatcttcttgccgaactcttcacggcaaaggatcattcctccgcggggtccgcgaagtgttttgtgagtcgttgtcgttacaaagtcagcgtaaggaaccggattcggatgaaggccggctgcgacaagacccgcgatatgcgccatgtctaccatgaagtaagcgccgacttcatcagcgatttcacggaattttttaaagtcgatcgtgcgggggtatgcgctcgctccggcaacgatgagtttcggcttatgcgccagcgctttttcacgcacatcttcataatctatatattgcgtgtctttatcgacaccgtattctacaaagttgtattgaacgccgctgaaattaaccgggcttccgtgtgttaagtggccgccgtgggagaggttcatcccgagcaccgtgtcgccgtgctctaaaatcgtgaagtaaacagccatgttcgcctgagcgcctgagtgcggctgaacgtttacatgctcagctccgaaaatctctttcgcgcggtcgcgggcgatgtcctcaacgacatcaacatgctcacagccgccgtagtagcgtttgccggggtagccttcagcatatttgtttgttaaaacagagccttgtgcttccattaccgcttccgtcacgaagttttcagaagcaattaattcgatcttagtctgttgacgcttacgctcatctttgatggcgttaaacacttgtttatcttgtacaggtaaatgtttcatcagcgagatcctctcctatccgtttcctgttctttatttttaccaccttattgtacatggtttttcaggtgaatgtaacagcttatttaaaaaaatcacaaaatttaattagaaaacacgaacattatagaggaaaagtattttcatcattcgcattcatatacggcgcgaattccgcctatcagcttcggtcttgtccgggccatcgtcacatgtgcttctccaagctcacggctcgatatccggacagggacggcaacgggtttcagatgcatgccgatgaacgtatcaccgatgtcaatcccggcgtcagcctgaatcgattcagcgagcactggagaacgcatctgccggtatgcataagaggccatcgctccgcccgctttcgggacggggacggctgaaacaatggggagcctgaaccgctcggccgtttccgcttcaatgacaagcgccctgtttaaatgctcgcagcattgaaaagcaagatgcacacccgttttttccttaaaccggttaagtccgccgtatatcaattcagcccaatccccgcttccggcggtgccgatccggcttccggcggcttcacttgtactgcacccgaccaccagcagactgccgtccgtcagtcctgcctgctcttgaaactcagtcagcatgtccgtccatttttgcttcatctcttccattgtccagcacctcttacagatttttttcttcgtaatctgcgattttgccgatccgccgttcgtggcggccgcccgtaaattcagtcgtcagccagacttttgcgatttcgcgcgccagccccgggccgatgacgcgttcgcccatcgcaagaacattcgtgtcattgtgttcacgcgtcgcttttgcgctgaaggtgtcatgggcaagcgcacagcgtatgccctttaccttatttgcggagatgctcatgccgatgcctgtgccgcaaattaaaattcccctgtcagcttcgccgttcaccactttttccgctaccggaaaagcgtagtctgaataatcgacagagccggcgccgcattcacagcccatatcaatgtattcaatctgcaattcatccaaaagactttttatttcttcgcggatatggacgccgccgtgatctgacgcaatagctactttcattcatttacctcctaggtgtggctgggcgaagacagcccagtgtgcttgtcctttttattacgaaatccgttgatttcattctactctttcacattcgttttgcaaatgacctgtttgcagattttctgacagattacttgcttttcccgtcaagcaattgatcagccaaaagggtcagcagctcctccagttcgtcccgcgtctgtttataaacatcaagcggaccgccgaacgggtcagagatatcgccgctttcccccgtcacgtattctttaatggtaaaaactttgccctgactgttttgatatcggccttcaatcagctgtttatgctgttcggtcatcgccagcaccagatcggccgtctcgatatgttcttccgataagggagatgaactgtgattgagggcgatccgtttttcaaacagcgcttctacggcatgagccgacgcttttccgtgcggagacgcgaatacgccggccgagcttacgctgacatccagccctttcgtttctgctatggatttaaaaagagcctcagccatgggactgcggcacgtattgcctgtacaaacaaagattattttcatgtccgtcacctcttactacctattataaatgaagaaaaaagaaacggcatcttcgtttctttttttacgtatcttatatcggtaaaagcagtttcagcccgaatccgatcaaaatggctccgccaagcgcttcgctgtaggagccgagccatgactgcacctttcttcccgccaaaaggcccgcccatgttaaaacggtgctgaagaccccgaacagcgtaacggccagaaacggattggagccgttcatcccgagactgagcccgacagaaaagctgtccagactgacaccgaccgcaaacagcaacagtcccgagcctgccggagatatgagcggcccgtccgattgtttaaacgcggcgatcatcatctgcacccctaaaatgaaaagaagagatccgccgatgtaaacggcgagcatccccagaaaaccggacagcagatgcccggccgccattcctacaagcggcatcatgacatgaaacagcccgatgacaacccctatatgaaaaatctgttttttcttcagctgaatcattcccattccgagcccgacggaaaaggcatccgtccccaaagcaaatgccatgatgcttaaggagacaagttccccgatgaatagattcgacatgaataaaaacccccttggacgtgcccgcttgtttagcttatgcatgtccgataaggggtagaacaagttaatggataacggtgccgcctgcggctttcatcagcctgttcataacggcgagccccactccggtatccggaaaggactcagaaataatcatatccacttccgcttcatcaaagctgcggagcgcatcgtataaggcggacgccactgtttcaaggtcggcgcgtctgccgcagaccttgatataatcagcctggtaactatcggcgttctcttctgttgtcaaaatgccgattcgttttccccggcttttatatgcgtctgccagttcttgaattctccgggcgccgccgtcggcaatagccatcggcgcagaaggcgcgtaatgtgtatatttcataccgggagaaataggaacctcatcttcttcggtcagtcctttatccacaagaaccggaccggcggcggattcaatctgctcttttgtcacgccgcccggacgaagcagcacgggctgtttccccgtacaggacagaacggttgattccactccgattcccgtcgcgccgccgtccacaataccggcaatacggccgtttaaatcatgagctacatgctcggccttcgtcgggctcggttttcctgataaattggcgctcggcgcggcgatcggcagtccggccgagctgatgagggctaatgctgccggatgatcaggcattctgaccgctaccgtctccagtcccgcggtgacacggggtgacagcacaccgggcttacacggcaggacaagggtcagcgcccccggccagaatagctccataagctttttcgccgtctcaggaatatggctgataaaacgatcaagctggctgatatgggatatatgcacaatcagcgggttatcgctcggccttcctttcgcctcatatattttcgttacggcttccgtattttcagcgttagcgcccagtccgtaaacggtttctgtcggaaaagccacaacctcattctgccggagcaattccgcggcttgtgtaatttggggatcggttgtggataattctgcggaacaatccacaaaccatcttcttgttttcatgtataaccaaactccttattttaaagcggtaaaactttattttctctcgtgtattccttttgaaagtataaaagatgtcctttaataaaacaagcgttatccacaaactgtggacaacactttttaataagtggataaccttgtgtataagttagatcaggcagaggttttcaccattaaaaacgaaccttctgtgcataacgagttgcggaaatgttcggacgtatacagttcctcaggcgcatcggcgcacgcttcaaatcccatcacattcagaaactcagcagatgagggctgattggcgactaagtagacatcttgaatttcatgttttttgcacagcacatccatactttgaaacagtgtaacgatatggctttgattcagcctgtccgacatgacgagtgaacggagaagcccttttccgccgctgaatttttcgatcccgagacaggcggcaatctttttttcgctgtcttccagcacgataaaccggctgatctgctgatcgatttccgcatgtgccgtatcagactttttcaaaaaggcctccagcgcctccgtatcttgatctcttgccactctcagctgataaaacatatatttccctccgtttcgatcaactctttcttccaatctatgaatcgaatccggatttatgccttttgcttcaggaaaatagatctgaaatccaatcgacgaggaaaaacttcacttcggtatcatcgtcatctttattttctttcttcgctttatcggcctttgcttttacgtcatccagcactttttctgtctgtttctgcgtttcttcctgcttctgtccgccgtcttcctgatctttcaccgcttcgccgtttgagaaatcaaggaagcacagcggcggaaacaagacgcaccaccagttggcgccctcgccattgccgagtgtaattaaaatggcttcatattttccggccggatagaccatattgccgtacagctttgtcggaaacgagattttattgaattgaactgaaacggattgatgcgcacccttttctttcatcgtttgtttggcgatttctttaatttcaggaagcttcgaacgaatgagccgccgcgcttcttcaatggaagtgatatctttcacccagtccgtgatttgcttgtttacagcatctctgatctggcgcttgagcttttgatcctcatcgttatcactgttggccaaaatcctgagccggatcgcttcatccggtatgacgacgggctcatcggctgatgcccgcgccgtttcttcttttgtcaaacccgcaagcgctcctgataataaaagaaaaatatatatgcagatcatcattgtctgtttcatcggtccccaccgttcctctccgtgctttttttatctagtcccattatggacatgacggaaaaggtttaaaccggcgggaagaaaaaaatctagcaagctgataatctgcattgacagattcaaaatatggtacgatattattttgataggaggttttcagatgaaatataattacaccgtgctgctgtcggcggcatgtatgtctgtcatttattctattttgtatgttcatcaattcattatcgcggctttcatttcgatggcgttttattttttgtttccttatttgatttttgcgctgccgcttcaatactttctgaataaaaagccgaagagatttcatccgctgtattttctttattatttgggggtgtcgttcattgcaaacgggatcatcttcggtcttttgcagccgtcaggccaatctctgttttctaattcagccttttatatctttgcggttttaacagccgtcgtctattgggtatgggattccgtattgctgcaaagacaaaatccggctacagaagcgtaatcagcagacagccggctgaagggagagcggcgcaaaagaaaacggcggccatctttaaacgggcgcgccgtccttcttctgtttcagaatgataattggcccgctgctccgctccgcttacggccagcccggaaacgatgaccgctgcgacgataagaacagccgtaacggcgccgagaatgatgtcaaagccaaacggcaggacaaatccagccgcataagctgcggcggcgagtatacatccgaaggcgaacgcttttttcaaggcggatgcccctttcattttctttccattgtaacaaaagcccgccgtgtgcgtcaccggcgggcttttttcatgatgtgatgaccgcggatacggttctgtcttttccgttgatgtcctgtacgacttccacttccgcattcggaaaggaatgacggaacaggtctttcacggcttttccctgattatatccgatttcaaagacgacaagcgctttatctttcatgacaagaggcagctcctccataaaccgcttgtagaatttcaaaccgtcaccgccgtccgtaagtgcatgaagcggctcatggaaacggacgatatccgacaaatccgccatttcttcttcagaaatatacggcggattggaaacaataatatccgcttttattcctgatgaaataaaaggagttaacagatctccctgcaaaaagcggacgtccgctccgaggttttgcgcatttctttccgccacctgaagcgcttcttttgaaatgtccgaagccgatactgaaaaatgtccgcattcaagcgcgagcgtcaccgcaatggctccgctccccgtaccgatatcaatgacgttcaggcgttctccctcagaaaacacccgcttctgtctgtccagcagatgaaagacgacttcttccgtttccggacgcggaatgagaacatcgtcattcacaaagaattctctgccgtaaaactgttctttcccgataatatattgaatcggaacgccttctttatgcatttccacatgccgtctgaatcggtaaagctcgtcctcgccgacgggctcctgcagacttgcgagaagcttgctccgatccattccggtatcatttaacagcagcagctcggccgcgtttttttctcttcccgcttcggttaaataagaagaagcccagcttagggcttcaaaaacggtcttcatcttaattttccgcctgctggagcttgcttgactggtcttctacgattaacgcttcaaccacttcatcaagcttgccttccaggatttgatccagcttttgaatcgtcaggccgatacggtgatccgtcacacggttttgcgggaaattgtatgtgcggatacgctcggaacggtcgcctgatccgacggctgatttacgggtctgatcatattcagcctgagcttcctgctggaatttgtcatagattctggcgcggagcaccttcatcgctttttctttatttttaatctgagatttttcatcctgacaggatacgacgacaccggtcggtaaatgcgtcaggcgtacggccgacatcgtcgtatttacgctttgtccgcccggtccgcttgatgcgaatgtatcgacgcggatgtctttttcgtggatgtccacttctacttcttccgcttcaggaagacacgccaccgtcgccgtggatgtatgaatacggccgcctgattccgtttccggcacacgctgtacgcggtgcgcgccattttcatacttcagcttggagtatgcgccttttcccgtaatcataaagatgatttctttgtaaccgcccgttccggtcacgtttgcttccatgacttcagtcttccagccttggatttcagcgtaacgggagtacattctgtagagatttcccgcaaacagcgcggcttcttctcctcccgctgctccgcggatctccatgattacgtttttgtcatcgttcgggtctttcgggatgaggagcactttcaaacgctctgataaggtttccgtctctccctgcagttcggagatttcttccttcaccatttctctcatatcggcatcaagcttttcctcaagcatcgctttcgcatcggcaagctgttctgatgcgtctctgtattgtctatagacttcaacggtttcttgtatatcagattgctctttcgaatattctctaagctttttcggatcgttgaccacttccggatcacttaaaagctcatttaatttttcgtatcgttgttcaattgactgtaaacggtctaacacggtcttcacctctgttttcctgtgcgtaacattctcattatagtatagggcttatcaccagtcaaaagcaattcgcctctgttatactgaagcaaaaaaggaggggcggatatgctgaaatccatccaccatatagcaatcatatgctctgattatgaaaagtcgaaagctttttacaccgagatactcggtttcggcattataaaagaaacataccgaaaggaacgggaatcttataaactcgatctggcgctggacggcgcgtatgcgattgaattgttttcctttcccgatccgcccgaacggccgaccagaccggaagccgcgggtctccggcatctcgccttcaccgtaaacgatcttgaagcagccgtcagggagttaaagaaaaagggcgtcggcacagaaccgatcagaaccgatccgctgacggggaaacggtttacctttttcttcgatcccgacaagcttccgcttgaattgtatgaagcgtaacgttttttgaagaaatgccgctttctttggcgaattccttcttgttttgtctaacatgaagggaacgccgcctcatggtcgaatacctagcaaaaaggaggtatgtgatcatgaatacaaacatggccgcgaaagagctcggcgtctccgcaaaaacggtgcaaaggtgggtcaagcagctgaatcttccggctgaacggaatgagctcggacattattcctttacacctgaggatcttgatgtgctgaaatcggtcaaacggcaaatttctgaaggcactgcccttctggacgttcaagtgccccggcagccgaaaaaacggacgggcttcattttgcagcgtccgaaaatcaatggcggcgctgaacaaaggttggcagagctggagcgcaaactggacattctcacgaaagagaaacaggatgagaaccatctgctttcaaggatagaggagcttgaacgccagctgaaacaaaaggcggatgaaggggtgtcttatcagcttcttcagcacagacgggaaattgacgacctcaataccgaattgcagacattggcctcccgcatccaggaacttgcccagacagctcccctctcagaaacagccgcttcttcagaacataagaaacccagaaaaaaaacgagattttcgccttttaaatttcaattctaatcaaaaaagctccctgaaacagggagcttttcattatgcagtcagcgcaatgatgatcggcagtgagataagagataaaatcgcactgatcacgaacgcggacgcagtttcttcctcttgtttttcgaaacgtgtggcaatcatcgccgctaccgcagatccagggaatgcgacgagcaataccgctttagtgatctggtcagccggaagtccgactgcaagagcgatcaagtacatcagcgcaggctgaacggcaacttttaacaaagcgataccgaaagccggcagactgagcttgatgttgcggataccgacagttacaccgacggcaaagagtgcaacacctgatgttgtgcttccgagctgatcaagcattttttcacccaagccagggagtgttacaccgcagagtaccaggatgatactgataagcggtgcagccgcaagcggttcggaaagaccgtgaagaatagacttaccagtcattttccagaagttctcgttttcgctgtcttgtttcttagatgactcaccgactgtagcgataatgatcgcaagcgggtcaaggatggcgttaaccacgatacccgtaacggcgataggaatcgctacttcgtttgctccgaataagcttccgagtaccggaatacccataaatgcaaatgtcggctgtgcagagtttaaagaaaatacagatgaattcgttaaatcatacttgaagataaatttgcaaaccaacaaaatgacgataaagaatccgacaatcccaatgatcaaagcgatcattaaaggaacctgtgataaaaacgcacttcttgaagtggttaaaatacttgcgataaaatgcgccggaagcgcgtacttcgtaactaaggtgcttaccccttttgctgacttcgcgtcataacttccgaagcgacctgcgaaccatcccagcacgatcacgaaaaagatcggcgccaggaggattaaaatatctaagaagctcaaaatattctcctccaaatccttaatgtccgtatactttagcctttacataaaagctttccctcggactgtaaaattaatcgtaaaaattatttagcgataacttgtttatattgcggtttccacattgcatcaagaacggcttgttctacattctcaggaatgcggtttgccacgccttctttaatggcagtttccgctacggcgatcgcaactttaattgaaacttcttgtaagtcgctcatgctcggcagaaggcctgcacccggtgtttcaaaatcaacgctttctgcgattgcgtcagcagttgccgcaaacattgcaggagtaatcactttcgcttctacaacgattgaaccgagaccaagtccagggaacgcgaatgcgttgttagattgtccgatttcatgagaaacgccattgtactctacattgtcaaacgggcttcctgtcgccacaagcactttgccgtcagtccatttgaatagatcgctaggaacggcttcagcaagcggtgtcgggttagacatcggcatgatgaccggacgctcaacgtgttttgccatttctttgacgatttcttcactgaacgcgccgctttggcctgatgtaccgattaagattgtcggtttcgcttgacggatcacttcaatgaaaggaatttgtccgttttcatcgcgtttccaatctttaatttcttcagctgtgcgcaggtacggctcttggaaatcaagaatgttttccataccttcaattaacaagcctctgtagtccattgtgtagaacgctttgttggcttcttcttcagaaagaccggcaagcaccatagtgtcgcggatttggtcagcgattccgattccggcagatcccgcaccgaagacaaccacacgctggtctttaatagacgcgcctgtttcttcatagccgcaagcacacctgcaagcgtatcgcgcctgttccttgaatgtcatcgttgaatgtaagaatttcatgattgtatttcttcatgatattgcgcgcgtttttgtttccaaggtcttcccagtgaagaagagctttagggaaatatttaagcgcagcttttacataagcgtcaatgaaagcttcataacgttcgccttggatacgttcatggcggttaccgatgtataaaggatcgttcagaagtttttcgttgttcgtaccgacgtcaagaacgacaggaataacacggcttgggtcaataccggcagcagctgtgtatacggctaatttaccgatggcgatgttgataccgcctacaccccagtcaccgattccgaggatgcttctgagtctgtcgcaacgatcagatcaatatctccggcagtggcatgaaggttttcaaatgcctcttcgattccttctacattgtcgatagaaaaggtaaatcccttgaggtcttctgtactcatggctgtattcttgaatcgcttcaccgacagtcggtgtgtaacaaccggcagcatttcacgaagatggttttgaagcaatttaaagaaaagaacttcgttacggttttgcaaatcattcaaatacacgttttggcgaaggcggtccggctgagcttgaaactgctcgtatgcgcgttttgcctgctcatcaagagacagaatggtcggaggaagcagccgtctaatccaaggctttttctttcttctgctgaaaacgcaacacctttatttaaagtagggatagtagaacttcttttcctcttaaagtgtttctaagttgccttccttcgtttactttaatatattcaagaaaatctccttctttcttcaaatagttaacaaagttaagtaattacccattttggctagtgtgatcgcgatctgctatatctttttttgacaattattcgaacaatgtctcataactatttacattacttagtcattttatgcctgtaaaaatgaaattcaagagatgaaaattacttaattttttcatactcttttttaagttaattaactacaatttttgaaaaacgtcaaaaaacaccggattttttaccgatgttttcatgaaaagggttatttatcgtctgttttttcagcacttcgtggtgatgtctgcatctcgcttcgtatgactccgacgcgccgactaaaatgaccggatcatcataggagcgggcttccgtcaatcaaacgctgcgtacggcttgccggcgacccgcaaacggagcagaccgcctgcagcttcgtcactgattcggcaaccgccatcagattcggcaccacaccgaacggctctccccggaaatccatatcaagtccggccgcgatgacacgatagcctttatccgcaagcaaggataaatcgccgatgattgattcgccgaaaaactgcacttcatctaccgcgatgacgtccgtgctttcactgatatgatcccatatttcagccgaagacgagatgacgtggcttgtcatggatgtgccgttgtgagaaacgacagcctcctcactgtagcgattatcaatggcaggtttgaacaccttgacctcctgcttcgcatatgtcgctcttttcactctgcggatcagctcttctgatttccagagaacatgctgcgcatatcagctcaagccatccgctttgcttcattatgtacataggctatccgctcccctttttttcctgtttatggacataaaaaaaggcaagaagcaattcttgcctgcctgtaaatctattattacttaagaccgtattttttgttaaagcgatcaacacgaccatcagcagaagcgaatttttgacgtccagtgtagaatgggtggcattcagagcaaatctcaacgcgtacctcttcttttactgagcctgtttcaaattcatttccgcaagcgcatttaactgttgcttttttgaaattaggatgaattcctgctttcattgtatccatctccttccgccctgaatcccgtgtggaaacagagttattattccggagcgaatccggaacgcatatgagagaattatatcagtcatttactgcatttgcaaatacattttttatcagcggcgggctgatgatgaaaggtttgcctgcttccattcttggttgatcagatcgaagaattcctgattcgtttttgttttttcattttctcataaacttctgcgaagtcggagaatcagacatcgattgcggatcgcccatagacggtcaagatgctctttcggcacgagcagctcttccttcgcgtgccgccggaaaatccgtctttccgcaagagcggttgcaaactctcatagatgacgtcatccatccgggagcccgtgtctacgagcgccgtcgttcagccgcgtttccggaaaaagcgcttcggaattcagccggaagcgtacccgcttggcgggataaccgtctgccatcgttccgcgaccgctcgcggaatccgccgcggccggtcggccggttttgtagagcccgtgccagcgggactgtccatcagaatgccgttttttttttttaacagcatggttttttactaatttggcatcgaacgtcgactgacgacatccgctacgaacccgaccttcggttttcatcaattaagagacgatcaattcagcgtcaggagatttgtcgtaatgtgttagcctttttaacagcatggtttccggctttcggcggagtcagaccgctggccgaaaccgacgggccatcatatttcggttctttcggcgggattcagcgcaccgcacggccgttccgtaatagcgttcgttttcttacgcaccttgccggatactttgtcaccgtttcttaaatcaaagcggcggatctgggaagcagaaatgtagatgtcttctgagcttggcgagtaattaatcggtctgaggaagccgaatccttccgattggatgatttcgagcacgccttccataaacagaagatcctcctgctcggcgttggctttcaggatggcaaagattaattcttttttagtcagtttgctgtagtaggagattttataatgtctggccagttcatatagttcttttaatttcatattttccaaagaggaaatagatacgtctttcataaaaacaccacgcttttcatagtcaatgtattgctgttttcattcaaatcggctgcttcgcatgattccgccaaagcacattcttttataaaacgttcaggaacttctatcggtaacacttccacccatgatcggcgcttttttaaaaaaggaatgtcttaatgagttttgaaggaagcgaggacaaaaacttgagaagatcaatatttatatcgtctgtatgcggtagaatttgaaaatttcccagtactcaaaagaaggaatgacacagaaaaatcgcagcactctttatttttacctcatttcaaaaaattattcaacttaaataatgctttgacatataaatgatagggttgactcttttttgcaaaagaaaagcgggactttccgtcccgcttttctctatttatggccggatcacaagatttggttttttcttcaggctgtgtcttccgtcaacgaatcggaccgttcctgatttcgcccggatgaccaggctttcagtcgtgccgacggagcctttgaactgaacgcctttcagcagctctccgtccgtgacacccgttgcggcaaaaatggcgtcatcccctctcacaaggtcctccatccggagcactttggatacatcaaggcccattcgctcacagcgggcctgctcttccgcactttgcggcagaagcctgccgatgatttcgccgccgagcgcttttaacgcaacggcagacagcgccttcaggagccccgcctgaaccgaagagaatgtctactcccgtatggtcaaaggccgtattgatggcgcccgcgacatcaccgtcgttgatcagtttgattctggcgccccctcacgcaattcagagatgattttttcgtgtctgtcacgatttaaaatggttgccacgacatcttcaatgtctttgtttttcgctttcgcaacggcttttaagttatcaatgacaggcgcttcgatatcgatgcagcctaccgcttcgggaccgaccgcgattttttccatatacatatccggggcgttcagcaatgttccatggtcggcgaccgcgatcaccgtcagcgcattccagccgccgctcgctacgatgtttgtgccttcaagaggatcgacggcgacatcgacgcgcgggccgtatccgtttccaagcttttcgccgatgtaaagcatcggcgcttcatccatctcgccttccccgatcacgaccgtgcctttcatcggcaccgtgtcaaacacgtcacgcattgcgcttgtcgccgcatcatcagcttcatcttttttcccgcggcccatccatctggcagatgctaaagccgccgcttcagtgactcgaaccaattccatcgataagcttctttccatttcaacacgatctcctctcaaaagtccgcatttctatgaattttggagctgttctatctcttcgtccgtcagcctttgccgccagattgtggcgcccagaccttcgagttttttctcaagattgctgtagccgcggtctaaatgctcaagaccggtaatttcggttacgccgtcagccatgagcccggcgacgaccagacaagcgcctgcacgcagatcgctcgcctttacttttgcgccctgaagctcggccggaccggtgataatggccgacctgccttccactttcatattggcccccatccgtctcagctcatcaatatgtttaaatcgggccgagtagatggtgtcggttacgacgctcgtgccgctggctctcgttaacagagatgtcatcggctgctgaagatcagtcgggaatcccgggtaaacaagcgttttcacgtcgaccggttttatctgcttctgcccgccgagcataagaagctgatcgtcactcgtctcaatgtaaaaacccatttccctgagcttcgccgttaaagactccaggtgagtcggtatgacattatcaataatgacttctttccccatcgcggcgccggcgatcataaaggtgcccgcctcaattctgtccggaatgatcgtatgcctgcatccgtgcagcttttacgccgtcgattctgattacattggttcccgcacctttgatctttgcgcccatgctggtgagcaatgtggcaacatcaataatctcaggttccttggcggcgttttctatcacggttttaccttcagccagtacagcggcaagcatgatattaatcgtcgctccgacgctgacgacatctaaataaatccgtgcgcctctcagcctttcggcgcgcagataaatcgcgccttgttcattggtgacttccgctccaagcgcctcaaaccctttgatatgctggtcaatcggccgcggaccgagatggcatccgcccggcagtccgatgaccgcctgtttgaagcggccgagcatcgcgcccattaagtaataggaagcgcggagttttttcactttgccgttgggaagcggcatgctgatcatcggggaagggtcaacgaccatttctcctttttcaaaatggacgtttccgccgatttctttcagcaggtcacgcagcgtttcaatatctgagatctccggaagcccttcgatcgttacttcggaatttgccagaatggttgcgggtatcaatgcgacggcgctgtttttcgcaccgctgatgtacggttccgtttaacggatcgccgccggcaatattcaacttttccatgatagtctccttccataagaagatagctgcggagcgtaaataaaatggcattttattctgtctctgcaaataaagctcttgtccaaaatgtagccaattcgaagagaaagaatacaaggacattataaaataacaggaagaaaatagcgaagctttgcggggcatttttaacacaggatgcacagaggcccgccgggttcatattccggggaaacacactcttcactttgatactgaaggcccgctgccaaacaggaaaacataagggtgcggcaaacggatgcaaccggtttgccgcccttttcccccttatttattccagtcagccaagaattgctcgatgcctttatccgttaacggatgtttcgtcagctggtgaatgactttcagcggcatcgtaccgatatgcgcaccgcgtaaagcggcttcagtcacgtgctgcgcatgacggatggaagctgcgatgatttgagtatcaatgtcatgaatgtcaaaaatctgtcttatttctgaaatcagttcaagaccgttatggccgatgtcatccacggcctaagaacggagatacataagtcgccccggctcttgccgccaaaagcgcctggttggcgctgaaaatgagcgttacgtttgttttaatgttcaggtcgctcagcgcttttacggcttttaacccttcagacgtcatcgggattttcaccgtaatattcggcgcgattttcgcaagttctttaccttcttcaatcatttcttcagcattcagggaaatgacttccgcgcttactgatccgctcacgacttccgtaatctcacgaagtctgtcatggaaagacacgtcagcttctttcgccactaaactagggtttgtcgtaactccggcaagaacgccaagttcataagcttctttaatctcgtcaatgtttgctgtatcaatgaaaaataacataaggaaagcctcccagtaataaattttcagaactgtaaaacatgattgcgctttctaaaggtaagacataaaaccgcctgtcaatgctgtcaggcggtttatggatgttacattggattaagcttggtttgaagaaccgaactcacgcattttgccgataaccgtttctttgatcgcttcacgagcaggtccaagatatttacgaggatcgtattcgttcggcttagctgccaatgtttcgcggacagcttttgcagaagaaatttggttttcagtgtttacgttgattttagccgtaccaagtgagattgattttttaatgtcggcagtcggaattcctgtaccgccgtgaagtactaacggaaggccggttgatttgccgatatcttccatttctttgaaaccgaggttcggttcgcctttgtaagggccgtgaacagaacccagtgcaggtgcaaggcagtcgatgccagtgcgctctacaagttcttgacactctttagggtcagcatagattacgccttcagcgatcacgtcatcttcctgtccgcctacagttccaagctcagcttcaactgaaacgccgtggaaatgagcaagctcaaccactttagctgtagttgctacgttttcctcaaacggatggtgagatgcgtcgatcattacagaagtgaaacctgcatgaatcgctttcgcacaagattcaaagcttgaaccgtggtctaagtgaatcgcgacaggaactgtcactttgtattcttccataagagctttaaccatggcaaccactgttttgaagccgcccatgtagcgtcccgcgccttctgaaacaccaagaataaccggggatttttcctcttctgctgcttgtaaaatagcttgagtgaactcaaggttatttaagttaaattgt
